(19) United States
(12) Patent Application Publication
(10) Pub. No.: US 2009/0265813 A1
(43) Pub. Date: Oct. 22, 2009

(54) STRESS TOLERANCE IN PLANTS

(75) Inventors: Neal I. Gutterson, Oakland, CA (US); Oliver J. Ratcliffe, Oakland, CA (US); T. Lynne Reuber, San Mateo, CA (US); Karen S. Century, Albany, CA (US); Katherine Krolikowski, Richmond, CA (US); Jennifer Costa, Union City, CA (US); Robert A. Creelman, Castro Valley, CA (US); Frederick D. Hempel, Albany, CA (US); Roderick W. Kumimoto, San Bruno, CA (US); Emily L. Queen, San Bruno, CA (US); Peter P. Repetti, Emeryville, CA (US); Luc Adam, Hayward, CA (US)

Correspondence Address: MENDEL BIOTECHNOLOGY C/O MOFO SF, 425 MARKET STREET, SAN FRANCISCO, CA, 94105, US

(73) Assignee: Mendel Biotechnology , Inc., Hayward, CA (US)

(21) Appl. No.: 12/064,961

(22) PCT Filed: Aug. 31, 2006
(86) PCT No.: PCT/US2006/034615

§ 371 Date: Dec. 22, 2008

Related U.S. Application Data
(60) Provisional application No. 60/713,952, filed on Aug. 31, 2005.

(51) Int. Cl. C12N 15/82; A01H 5/00

(52) U.S. Cl. 800/290; 800/298; 800/278

(57) ABSTRACT

Transcription factor polynucleotides and polypeptides incorporated into expression vectors have been introduced into plants and were ectopically expressed. Transgenic plants transformed with many of these expression vectors have been shown to be more resistant to disease (in some cases, to more than one pathogen), or more tolerant to an abiotic stress (in some cases, to more than one abiotic stress). The abiotic stress may include salt, hyperosmotic stress, heat, cold, drought, or low nitrogen conditions.

### ACKNOWLEDGEMENT

[0001] This invention was supported in part by NSF SBIR grants DMI-0215130, DMI-0320074, and DMI-0349577. The U.S. government may have certain rights in this invention.

### JOINT RESEARCH AGREEMENT

[0002] The claimed invention, in the field of functional genomics and the characterization of plant genes for the improvement of plants, was made by or on behalf of Mendel Biotechnology, Inc. and Monsanto Corporation as a result of activities undertaken within the scope of a joint research agreement, and in effect on or before the date the claimed invention was made.

### FIELD OF THE INVENTION

[0003] The present invention relates to plant genomics and plant improvement.

### BACKGROUND OF THE INVENTION

[0004] Abiotic stress and yield. In the natural environment, plants often grow under unfavorable conditions, such as drought (low water availability), salinity, chilling, freezing, high temperature, flooding, or strong light. Any of these abiotic stresses can delay growth and development, reduce productivity, and in extreme cases, cause the plant to die. Enhanced tolerance to these stresses would lead to yield increases in conventional varieties and reduce yield variation in hybrid varieties. Of these stresses, low water availability is a major factor in crop yield reduction worldwide.

[0005] Water deficit is a common component of many plant stresses. Water deficit occurs in plant cells when the whole plant transpiration rate exceeds the water uptake. In addition to drought, other stresses, such as salinity and low temperature, produce cellular dehydration (McCue and Hanson, 1990).

[0006] Salt (and drought) stress signal transduction consists of ionic and osmotic homeostasis signaling pathways. The ionic aspect of salt stress is signaled via the SOS pathway where a calcium-responsive SOS3-SOS2 protein kinase complex controls the expression and activity of ion transporters such as SOS1. The pathway regulating ion homeostasis in response to salt stress has been reviewed recently by Xiong and Zhu (2002a).

[0007] The osmotic component of salt-stress involves complex plant reactions that are possibly overlapping with drought- and/or cold-stress responses. Common aspects of drought-, cold- and salt-stress response have been reviewed by Xiong and Zhu (2002). These include:

[0008] Abscisic acid (ABA) biosynthesis is regulated by osmotic stress at multiple steps. Both ABA-dependent and -independent osmotic stress signaling first modify constitutively expressed transcription factors, leading to the expression of early response transcriptional activators, which then activate downstream stress tolerance effector genes.

[0009] Based on the commonality of many aspects of cold, drought, and salt stress responses, it can be concluded that genes that increase tolerance to cold or salt stress can also improve drought stress protection. In fact, this has already been demonstrated for transcription factors (in the case of AtCBF/DREB1) and for other genes such as OsCDPK7 (Saijo et al. (2000)), or AVP1 (a vacuolar pyrophosphatase-proton-pump, Gaxiola et al. (2001)).

[0010] Heat stress often accompanies conditions of low water availability. Heat itself is seen as an interacting stress and adds to the detrimental effects caused by water deficit conditions. Evaporative demand exhibits near exponential increases with increases in daytime temperatures and can result in high transpiration rates and low plant water potentials (Hall et al. (2000)). High-temperature damage to pollen almost always occurs in conjunction with drought stress, and rarely occurs under well-watered conditions. Thus, separating the effects of heat and drought stress on pollination is difficult. Combined stress can alter plant metabolism in novel ways; therefore, understanding the interaction between different stresses may be important for the development of strategies to enhance stress tolerance by genetic manipulation.

[0011] Plant pathogens and impact on yield. While a number of plant pathogens exist that may significantly impact yield or affect the quality of plant products, specific attention is being given in this application to a small subset of these microorganisms. These include:

[0012] Sclerotinia. Sclerotinia sclerotiorum is a necrotrophic ascomycete that causes destructive rots of numerous plants (Agrios (1997)). Sclerotinia stem rot is a significant pathogen of soybeans in the northern U.S. and Canada.

[0013] Botrytis. Botrytis causes blight or gray mold, a disease of plants that infects a wide array of herbaceous annual and perennial plants. Environmental conditions favorable to this pathogen can significantly impact ornamental plants, vegetables and fruit. Botrytis infections generally occur in spring and summer months following cool, wet weather, and may be particularly damaging when these conditions persist for several days.

[0014] Fusarium. Fusarium or vascular wilt may affect a variety of plant host species. Seedlings of developing plants may be infected with Fusarium, resulting in the grave condition known as “damping-off”. Fusarium species also cause root, stem, and corn rots of growing plants and pink or yellow molds of fruits during post-harvest storage. The latter affect ornamentals and vegetables, particularly root crops, tubers, and bulbs.

[0015] Drought-Disease Interactions. Plant responses to biotic and abiotic stresses are governed by complex signal transduction networks. There appears to be significant interaction between these networks, both positive and negative. An understanding of the complexity of these interactions will be necessary to avoid unintended consequences when altering plant signal transduction pathways to engineer drought or disease resistance.

[0016] Physiological interactions between drought and disease. The majority of plant pathogenic fungi are more problematic in wet conditions. Most fungi require free water on the plant surface or high humidity for spores to germinate and successfully invade host tissues (Agrios (1997)). Therefore, overall disease pressure is generally lower in dry conditions. However, there are exceptions to this pattern. Water stress can increase the incidence of certain facultative pathogens such as root rots, stem rots, and stem cankers (reviewed in Boyer (1995)). Some examples of diseases that are more prevalent or severe in drought conditions are Fusarium root rot and common root rot (Bipolaris sorokiniana) of wheat, corn smut, and root rot and charcoal rot of soybeans (North Dakota State Extension Service 2002, 2004). Vulnerability to pathogens may be increased when water stress decreases available photosynthate and therefore energy to synthesize defensive compounds (Boyer (1995)). The increased damage caused by root rots in dry weather may also reflect the inability of the plant to tolerate as much root damage under dry conditions as under ample water. Increasing crop drought tolerance may decrease vulnerability to these diseases.

[0017] Transcription factors (TFs) and other genes involved in both abiotic and biotic stress resistance. Despite the evidence for negative cross-talk between drought and disease response pathways, a number of genes have been shown to function in both pathways, indicating possible convergence of the signal transduction pathways. There are numerous example of genes that are inducible by multiple stresses. For instance, a global TxP analysis revealed classes of transcription factor that are mainly induced by abiotic stresses or disease, but also a class of transcription factors induced both by abiotic stress and bacterial infection (Chen et al. (2002a)).

[0018] Implications for crop improvement. Plant responses to drought and disease interact at a number of levels. Although dry conditions do not favor most pathogens, plant defenses may be weakened by metabolic stress or hormonal cross-talk, increasing vulnerability to pathogens that can infect under drought conditions. However, there is also evidence for convergence of abiotic and biotic stress response pathways, based on genes that confer tolerance to multiple stresses. Given our incomplete understanding of these signaling interactions, plants with positive alterations in one stress response should be examined carefully for possible alterations in other stress responses.

### SUMMARY OF THE INVENTION

[0019] The present invention pertains to transcription factor polynucleotides and polypeptides, and expression vectors that comprise these sequences. A significant number of these sequences have been incorporated into expression vectors that have been introduced into plants, thus allowing for the polypeptides to be ectopically expressed. These sequences include polynucleotide sequences 1 to 2n−1, where n=1 to 210, and polypeptide sequences 1 to 2n, where n=1 to 210. The expression vector comprises a constitutive, an inducible or a tissue-specific promoter operably linked to the polynucleotide sequence of the expression vector. Transgenic plants transformed with many of these expression vectors have been shown to be more resistant to disease (and in some cases, to more than one pathogen), or more tolerant to an abiotic stress (and in some cases, to more than one abiotic stress). The abiotic stress may include salt, hyperosmotic stress, heat, cold, drought, or low nitrogen conditions.

[0020] Alternatively, the expression vector may comprise a polynucleotide that encodes a transcription factor polypeptide sequence fused to a GAL4 activation domain, thus creating either a C-terminal or an N-terminal GAL4 activation domain protein fusion. Using a number of the sequences of the invention, these constructs have also been shown to confer disease resistance or abiotic stress tolerance when the plants express the fusion protein.

[0021] Transgenic plants that are transformed with these expression vectors, and seed produced by these transgenic plants that comprise any of the sequences of the invention, are also encompassed by the invention.

[0022] The invention is also directed to methods for increasing the yield of a plant growing in conditions of stress, as compared to a wild-type plant of the same species growing in the same conditions of stress. In this case, the plant is transformed with a polynucleotide sequence encoding a transcription factor polypeptide of the invention, where the polynucleotide is operably linked to a constitutive, inducible or tissue-specific promoter. The transformed plant that ectopically expresses the transcription factor polypeptide is then selected, and this plant may have greater yield than a wild-type plant of the same species (that is, a non-transformed plant), when the transformed plant is grown in conditions of salt, hyperosmotic stress, heat, cold, drought, low nitrogen, or disease stress.

### BRIEF DESCRIPTION OF THE SEQUENCE LISTING AND DRAWINGS

[0023] The Sequence Listing provides exemplary polynucleotide and polypeptide sequences of the invention. The traits associated with the use of the sequences are included in the Examples.

[0024] CD-ROMs Copy 1—Sequence Listing Part, Copy 2—Sequence Listing Part, Copy 3—Sequence Listing Part, and the CRF copy of the Sequence Listing, all filed under PCT Administrative Instructions §801(a), are read-only memory computer-readable compact discs. Each contains a copy of the Sequence Listing in ASCII text format. The Sequence Listing is named “MBI0061PCT.ST25.txt”, was created on 28 Aug., 2006, and is 1,587 kilobytes in size. The copies of the Sequence Listing on the CD-ROM discs are hereby incorporated by reference in their entirety.

[0025] FIG. 1 shows a conservative estimate of phylogenetic relationships among the orders of flowering plants (modified from Soltis et al. (1997)). Those plants with a single cotyledon (monocots) are a monophyletic clade nested within at least two major lineages of dicots; the eudicots are further divided into rosids and asterids. Arabidopsis is a rosid eudicot classified within the order Brassicales; rice is a member of the monocot order Poales. FIG. 1 was adapted from Daly et al. (2001).

[0026] FIG. 2: Phylogenetic tree of CAAT family proteins. There are three main sub-classes within the family: the HAP2 (also known as the NF-YA subclass), HAP3 (NF-YB subclass) and HAP5 (NF-YC subclass) related proteins. Three additional proteins were identified that did not clearly cluster with any of the three main groups and we have designated these as HAP-like proteins. G620, SEQ ID NO: 358, corresponds to LEAFY COTYLEDON 1 (LEC1; Lotan et al., 1998) and G1821, corresponds to LEAFY COTYLEDON 1-LIKE (L1L; Kwong et al., 2003). Other sequences shown in this tree include G1364 (SEQ ID NO: 14), G2345 (SEQ ID NO: 22), G481 (SEQ ID NO: 2), G482 (SEQ ID NO: 28), G485 (SEQ ID NO: 18), G1781 (SEQ ID NO: 56), G1248 (SEQ ID NO: 360), G486 (SEQ ID NO: 356), G484 (SEQ ID NO: 354), G2631 (SEQ ID NO: 362), G1818 (SEQ ID NO: 404), G1836 (SEQ ID NO: 48), G1820 (SEQ ID NO: 44), G489 (SEQ ID NO: 46), G3074 (SEQ ID NO: 410), G1334 (SEQ ID NO: 54), G926 (SEQ ID NO: 52), and G928 (SEQ ID NO: 400). The tree was based on a ClustalW alignment of fall-length proteins using Mega 2 software (protein sequences are provided in the Sequence Listing).

[0027] In FIGS. 3A-3F, the alignments of G481, G482, G485, G1364, G2345, G1781 and related sequences are presented. These sequences from Arabidopsis (At) are shown aligned with soybean (Gm), rice (Os) and corn (Zm) sequences with the B domains indicated by the large box that spans FIGS. 3B through 3C. The vertical line to the left in each page of the alignment indicates G482 clade members.

[0028] FIG. 4 is a phylogenetic tree of G682-related polypeptide sequences from Arabidopsis thaliana (At), rice (Os), maize (Zm) and soybean (Gm). The tree was based on a ClustalW alignment of full-length proteins using Mega 2 software (protein sequences are provided in the Sequence Listing). The arrow indicates the node identifying an ancestral sequence, from which sequences with related functions to G682 were descended. Sequences shown in this tree include G1816 (SEQ ID NO: 76), G3930 (SEQ ID NO: 412), G226 (SEQ ID NO: 62), G3450 (SEQ ID NO: 74), G2718 (SEQ ID NO: 64), G682 (SEQ ID NO: 60), G3392 (SEQ ID NO: 72), G3393 (SEQ ID NO: 66), G3431 (SEQ ID NO: 68), G3444 (SEQ ID NO: 70), G3448 (SEQ ID NO: 80), G3449 (SEQ ID NO: 78), G3446 (SEQ ID NO: 82), G3445 (SEQ ID NO: 84), G3447 (SEQ ID NO: 86), and G676 (SEQ ID NO: 350).

[0029] FIGS. 5A and 5B show the conserved domains making up the DNA binding domains of G682-like proteins from Arabidopsis, soybean, rice, and corn. G682 and its paralogs and orthologs are almost entirely composed of a single repeat MYB-related DNA binding domain that is highly conserved across plant species. The polypeptide sequences within the box are representatives of the G682 clade. Residues making up the consensus sequence appear as boldface text. Sequences shown in this alignment include G214 (SEQ ID NO: 346), G1816 (SEQ ID NO: 76), CPC (CAPRICE; Wada et al. (1997)), G226 (SEQ ID NO: 62), G3450 (SEQ ID NO: 74), G2718 (SEQ ID NO: 64), G682 (SEQ ID NO: 60), G3392 (SEQ ID NO: 72), G3393 (SEQ ID NO: 66), G3431 (SEQ ID NO: 68), G3444 (SEQ ID NO: 70), G3448 (SEQ ID NO: 80), G3449 (SEQ ID NO: 78), G3446 (SEQ ID NO: 82), G3447 (SEQ ID NO: 86), G3445 (SEQ ID NO: 84), and G676 (SEQ ID NO: 350).

[0030] FIG. 6 depicts a phylogenetic tree of several members of the RAV family, identified through BLAST analysis of proprietary (using corn, soy and rice genes) and public data sources (all plant species). This tree was generated as a Clustal X 1.81 alignment: MEGA2 tree, Maximum Parsimony, bootstrap consensus. Sequences that are closely related to G867 are considered as being those proteins descending from the node of the tree, indicated by the arrow, with a bootstrap value of 100, bounded by G3451 and G3432 (the clade is indicated by the large box). Sequences shown in this tree include G3451 (SEQ ID NO: 108), G3452 (SEQ ID NO: 98), G3453 (SEQ ID NO: 100), G867 (SEQ ID NO: 88), G1930 (SEQ ID NO: 92), G9 (SEQ ID NO: 106), G993 (SEQ ID NO: 90), G3388 (SEQ ID NO: 110), G3389 (SEQ ID NO: 104), G3390 (SEQ ID NO: 112), G3391 (SEQ ID NO: 94), G3432 (SEQ ID NO: 102), G2690 (SEQ ID NO: 382), and G2687 (SEQ ID NO: 380).

[0031] FIGS. 7A-7H show an alignment of AP2 transcription factors from Arabidopsis, soybean, rice and corn. The AP2 domains of these sequences are indicated by the box and the right angle arrow “ [symbol] ” spanning FIGS. 7B to 7C, the “DML motifs” are indicated by box and the downward arrow “↓” spanning FIGS. 7C to 7D, and the B3 domains are indicated by the box and the right angle arrow “ [symbol] ” spanning FIGS. 7D to 7F. Sequences shown in this alignment include G3391 (SEQ ID NO: 94), G3432 (SEQ ID NO: 102), G3390 (SEQ ID NO: 92), G3389 (SEQ ID NO: 104), G3388 (SEQ ID NO: 110), G867 (SEQ ID NO: 88), G1930 (SEQ ID NO: 92), G993 (SEQ ID NO: 90), G9 (SEQ ID NO: 106), G3455 (SEQ ID NO: 96), G3451 (SEQ ID NO: 108), G3452 (SEQ ID NO: 98), G3453 (SEQ ID NO: 100), G2687 (SEQ ID NO: 380), and G2690 (SEQ ID NO: 382).

[0032] FIG. 8 compares the B3 domain from the four boxed RAV1 paralogs (G867, G1930, G9, and G993) with the B3 domains from ABI3 related proteins: ABI3 (G621), FUSCA3 (G1014), and LEC2 (G3035). G867 corresponds to SEQ ID NO: 88, G1930 is SEQ ID NO: 92, G9 is SEQ ID NO: 106, G993 is SEQ ID NO: 90, G621 is SEQ ID NO: 376, G1014 is SEQ ID NO: 378, G3035 is SEQ ID NO: 384, and the consensus sequence of the RAV1 B3 domain is SEQ ID NO: 938.

[0033] FIG. 9 represents a G1073 Phylogenetic Analysis. A phylogenetic tree and multiple sequence alignments of G1073 and related full length proteins were constructed using ClustalW (CLUSTAL W Multiple Sequence Alignment Program version 1.83, 2003) and MEGA2 (http://www.megasoftware.net) software. ClustalW multiple alignment parameters were as follows:

[0034] Gap Opening Penalty: 10.00; Gap Extension Penalty: 0.20; Delay divergent sequences: 30%; DNA Transitions Weight: 0.50; Protein weight matrix: Gonnet series; DNA weight matrix: IUB; Use negative matrix: OFF

[0035] A FastA formatted alignment was then used to generate a phylogenetic tree in MEGA2 using the neighbor joining algorithm and a p-distance model. A test of phylogeny was done via bootstrap with 1000 replications and Random Seed set to default. Cut off values of the bootstrap tree were set to 50%. Members of the G1073 clade in the large box are considered as being those proteins within the node of the tree below with a bootstrap value of 99, bounded by G2789 and the sequence between G3401 and G3408. Sequences shown in this tree include G2789 (SEQ ID NO: 372), G3407 (SEQ ID NO: 134), G3406 (SEQ ID NO: 116), G3459 (SEQ ID NO: 122), G3460 (SEQ ID NO: 126), G1667 (SEQ ID NO: 128), G1073 (SEQ ID NO: 114), G1067 (SEQ ID NO: 120), G2156 (SEQ ID NO: 130), G3399 (SEQ ID NO: 118), G3400 (SEQ ID NO: 124), G2157 (SEQ ID NO: 144), G3556 (SEQ ID NO: 142), G3456 (SEQ ID NO: 132), G2153 (SEQ ID NO: 138), G1069 (SEQ ID NO: 140), G3401 (SEQ ID NO: 136), and G3408 (SEQ ID NO: 146).

[0036] In FIGS. 10A-10H, Clustal W (CLUSTAL W Multiple Sequence Alignment Program version 1.83, 2003) alignments of a number of AT-hook proteins are shown, and include clade members from Arabidopsis (e.g., G1067, G1069, G1073, G1667, G2153, G2156, G2789), soy (e.g., G3456, G3459, G3460), and rice (e.g., G3399, G3400, G3401, G3407) that have been shown to confer similar traits in plants when overexpressed (closely related polypeptides are indicated by vertical line). Also shown are the AT-hook conserved domains (indicated by the right-angled arrow: [symbol] in FIG. 10C) and the second conserved domains indicated by the right-angled arrow [symbol] spanning FIGS. 10D through 10F). Sequences shown in this alignment include G2789 (SEQ ID NO: 372), G3460 (SEQ ID NO: 126), G3459 (SEQ ID NO: 122), G3406 (SEQ ID NO: 116), G3407 (SEQ ID NO: 134), G1069 (SEQ ID NO: 140), G2153 (SEQ ID NO: 138), G3456 (SEQ ID NO: 132), G3401 (SEQ ID NO: 136), G2157 (SEQ ID NO: 144), G3556 (SEQ ID NO: 142), G1067 (SEQ ID NO: 120), G2156 (SEQ ID NO: 130), G3400 (SEQ ID NO: 124), G3399 (SEQ ID NO: 118), and G1073 (SEQ ID NO: 114), G3408 (SEQ ID NO: 146).

[0037] FIGS. 11A and 11B show the AP2 domains of ERF transcription factors and the characteristic A and D residues present in the AP2 domain (adapted from Sakuma et al., 2002). Sequences shown in this alignment include G28 (SEQ ID NO: 148), G1006 (SEQ ID NO: 152), G22 (SEQ ID NO: 172), G1004 (SEQ ID NO: 388), G1792 (SEQ ID NO: 222), G1266 (SEQ ID NO: 254), G1752 (SEQ ID NO: 402), G1791 (SEQ ID NO: 230), G1795 (SEQ ID NO: 224), and G30 (SEQ ID NO: 226).

[0038] FIG. 12 shows a phylogenetic analysis of G28 and closely related sequences. A phylogenetic tree and multiple sequence alignments of G28 and related fall length proteins were constructed using ClustalW (CLUSTAL W Multiple Sequence Alignment Program version 1.83, 2003) and MEGA2 (http://www.megasoftware.net) software with the multiple alignment parameters the same as for the G1073 tree described above for FIG. 9. A FastA formatted alignment was then used to generate a phylogenetic tree in MEGA2 using the neighbor joining algorithm and a p-distance model. A test of phylogeny was done via bootstrap with 1000 replications and Random Seed set to default. Cut off values of the bootstrap tree were set to 50%. Closely-related sequences to G28 are considered as being those polypeptides within the node of the tree (the arrow indicates this node identifying an ancestral sequence, from which sequences with related functions to G28 were descended) below with a bootstrap value of 99, bounded in this tree by G3717 and G22. Sequences shown in this tree include G3717 (SEQ ID NO: 154), G3718 (SEQ ID NO: 156), G28 (SEQ ID NO: 148), G3659 (SEQ ID NO: 150), G1006 (SEQ ID NO: 152), G3660 (SEQ ID NO: 158), G3661 (SEQ ID NO: 162), G3848 (SEQ ID NO: 160), G3856 (SEQ ID NO: 166), G3430 (SEQ ID NO: 168), G3864 (SEQ ID NO: 164), G3841 (SEQ ID NO: 170), and G22 (SEQ ID NO: 172).

[0039] FIGS. 13A-13G are a Clustal W multiple sequence alignment of G28 and related proteins (CLUSTAL W Multiple Sequence Alignment Program version 1.83, 2003). The vertical lines in each of FIGS. 13A-13G indicate members of the G28 clade. The box spanning 13D-13E indicates the AP2 domain of the sequences within the clade. Sequences shown in this alignment include G1006 (SEQ ID NO: 152), G3660 (SEQ ID NO: 158), G28 (SEQ ID NO: 148), G3659 (SEQ ID NO: 150), G3717 (SEQ ID NO: 154), G3718 (SEQ ID NO: 156), G3430 (SEQ ID NO: 168), G3864 (SEQ ID NO: 164), G3856 (SEQ ID NO: 166), G3661 (SEQ ID NO: 162), G3848 (SEQ ID NO: 160), G3841 (SEQ ID NO: 170), G22 (SEQ ID NO: 172), G1752 (SEQ ID NO: 402), G1266 (SEQ ID NO: 254), G1795 (SEQ ID NO: 224), G30 (SEQ ID NO: 226), G1791 (SEQ ID NO: 230), and G1792 (SEQ ID NO: 222).

[0040] In FIG. 14, A phylogenetic tree and multiple sequence alignments of G47 and related fall length proteins were constructed using ClustalW (CLUSTAL W Multiple Sequence Alignment Program version 1.83, 2003) and MEGA2 (http://www.megasoftware.net) software. ClustalW multiple alignment parameters were the same as described above for G1073, FIG. 9. A FastA formatted alignment was then used to generate a phylogenetic tree in MEGA2 using the neighbor joining algorithm and a p-distance model. A test of phylogeny was done via bootstrap with 1000 replications and Random Seed set to default. Cut off values of the bootstrap tree were set to 50%. Members of the G47 clade are represented by the proteins in the large box and within the node of the tree below with a bootstrap value of 93, bounded by G3644 and G47, as indicated by the sequences within the box. Sequences shown in this tree include G2115 (SEQ ID NO: 406), G3644 (SEQ ID NO: 182), G3650 (SEQ ID NO: 180), G3649 (SEQ ID NO: 184), G3643 (SEQ ID NO: 178), G2133 (SEQ ID NO: 176), G47 (SEQ ID NO: 174), and G867 (SEQ ID NO: 88).

[0041] FIG. 15 shows a Clustal W alignment of the AP2 domains of the G47 clade. The three residues indicated by the boxes define the G47 clade; clade members (indicated by the vertical line at left) have two valines and a histidine residue at these positions, respectively. In the sequences examined to date, the AP2 domain of G47 clade members comprises VX₁₉VAHD, where X is any amino acid residue. The “VAHD subsequence” consisting of the amino acid residues V-A-H-D is a combination not found in other Arabidopsis AP2/ERF proteins. Sequences appearing in this alignment include G867 (SEQ ID NO: 88), and G47 clade members G47 (SEQ ID NO: 174), G2133 (SEQ ID NO: 176), G3643 (SEQ ID NO: 178), G3644 (SEQ ID NO: 182), G3650 (SEQ ID NO: 180), and G3649 (SEQ ID NO: 184).

[0042] In FIG. 16, A phylogenetic tree and multiple sequence alignments of G1274 and related full length proteins were constructed using ClustalW (CLUSTAL W Multiple Sequence Alignment Program version 1.83, 2003) and MEGA2 (http://www.megasoftware.net) software. ClustalW multiple alignment parameters were the same as described above for G1073, FIG. 9. FastA formatted alignment was then used to generate a phylogenetic tree in MEGA2 using the neighbor joining algorithm and a p-distance model. A test of phylogeny was done via bootstrap with 1000 replications and Random Seed set to default. Cut off values of the bootstrap tree were set to 50%. Members of the G1274 clade are represented by the proteins in the large box and within the node of the tree below with a bootstrap value of 78, bounded by G3728 and G1275. Sequences shown in this tree include G3728 (SEQ ID NO: 190), G3804 (SEQ ID NO: 192), G3727 (SEQ ID NO: 196), G3721 (SEQ ID NO: 198), G3719 (SEQ ID NO: 212), G3730 (SEQ ID NO: 210), G3722 (SEQ ID NO: 200), G3725 (SEQ ID NO: 214), G3720 (SEQ ID NO: 204), G3726 (SEQ ID NO: 202), G1274 (SEQ ID NO: 186), G3724 (SEQ ID NO: 188), G3723 (SEQ ID NO: 206), G3803 (SEQ ID NO: 194), G3729 (SEQ ID NO: 216), G1275 (SEQ ID NO: 208), G2688 (SEQ ID NO: 398), G2517 (SEQ ID NO: 220), G194 (SEQ ID NO: 218), and G1758 (SEQ ID NO: 394).

[0043] FIGS. 17A-17H represent a Clustal W alignment of the G1274 clade and related proteins. The vertical line at left indicates G1274 clade members. The “WRKY” (DNA binding) domain, indicated by the right-angled arrow “ [symbol] ” and the line that spans FIGS. 17E-17F, and zinc finger motif (with the pattern of potential zinc ligands C-X₄₋₅-C-X₂₂₋₂₃-H-X₁-H) are also shown (the potential zinc ligands appear in boxes in FIGS. 17E-17F). Sequences in this tree include G194 (SEQ ID NO: 218), G2517 (SEQ ID NO: 220), G3719 (SEQ ID NO: 212), G3730 (SEQ ID NO: 210), G3728 (SEQ ID NO: 190), G3804 (SEQ ID NO: 192), G3727 (SEQ ID NO: 196), G3721 (SEQ ID NO: 198), G3729 (SEQ ID NO: 216), G3720 (SEQ ID NO: 204), G3726 (SEQ ID NO: 202), G3722 (SEQ ID NO: 200), G3725 (SEQ ID NO: 214), G1275 (SEQ ID NO: 208), G3723 (SEQ ID NO: 206), G3803 (SEQ ID NO: 194), G3724 (SEQ ID NO: 188), G1274 (SEQ ID NO: 186), and G1758 (SEQ ID NO: 394).

[0044] FIG. 18 is a Clustal W-generated phylogenetic tree created using the conserved AP2 domain and EDLL domain of G1792-related paralogs and orthologs. Members of the G1792 clade are found within the large box. Arabidopsis paralogs are designated by arrows. Sequences shown in this tree include G1792 (SEQ ID NO: 22), G3518 (SEQ ID NO: 246), G3519 (SEQ ID NO: 232), G3520 (SEQ ID NO: 242), G3383 (SEQ ID NO: 228), G3737 (SEQ ID NO: 236), G3515 (SEQ ID NO: 238), G3516 (SEQ ID NO: 240), G3380 (SEQ ID NO: 250), G3794 (SEQ ID NO: 252), G3381 (SEQ ID NO: 234), G3517 (SEQ ID NO: 244), G3739 (SEQ ID NO: 248), G1791 (SEQ ID NO: 230), G1795 (SEQ ID NO: 224), G30 (SEQ ID NO: 226), G1266 (SEQ ID NO: 254), G1752 (SEQ ID NO: 402), G22 (SEQ ID NO: 172), G1006 (SEQ ID NO: 152), and G28 (SEQ ID NO: 148).

[0045] FIG. 19 shows an alignment of a portion of the G1792 activation domain designated the EDLL domain, a novel conserved domain for the G1792 clade. All clade members (in this figure the clade members are indicated by the vertical line to the left of the alignment) contain a glutamic acid residue at position 3, an aspartic acid residue at position 8, and leucine residues at positions 12 and 16 of the domain (thus comprising the subsequence EX₄DX₃LX₃L, where X is any amino acid residue), said residues indicated by the arrows above the alignment. Sequences shown in this alignment include G1791 (SEQ ID NO: 230), G1795 (SEQ ID NO: 224), G30 (SEQ ID NO: 226), G3380 (SEQ ID NO: 250), G3794 (SEQ ID NO: 252), G3381 (SEQ ID NO: 234), G3517 (SEQ ID NO: 244), G3739 (SEQ ID NO: 248), G3520 (SEQ ID NO: 242), G3383 (SEQ ID NO: 228), G3737 (SEQ ID NO: 236), G3515 (SEQ ID NO: 238), G3516 (SEQ ID NO: 240), G1792 (SEQ ID NO: 22), G3518 (SEQ ID NO: 246), G3519 (SEQ ID NO: 232), G22 (SEQ ID NO: 172), G1006 (SEQ ID NO: 152), G28 (SEQ ID NO: 148), G1266 (SEQ ID NO: 254), and G1752 (SEQ ID NO: 402).

[0046] FIG. 20 is a phylogenetic tree of G2999 and related proteins constructed using ClustalW and MEGA2 (http://www.megasoftware.net) software. ClustalW multiple alignment parameters used were the same as described for FIG. 9, above. A FastA formatted alignment was then used to generate a phylogenetic tree in MEGA2 using the neighbor joining algorithm and a p-distance model. A test of phylogeny was done via bootstrap with 1000 replications and Random Seed set to default. Cut off values of the bootstrap tree were set to 50%. The arrow indicates the strong node indicating the common ancestor of the G2999 clade (sequences in box). Sequences shown in this tree include G3668 (SEQ ID NO: 416), G2997 (SEQ ID NO: 264), G2996 (SEQ ID NO: 270), G2993 (SEQ ID NO: 276), G3690 (SEQ ID NO: 262), G3686 (SEQ ID NO: 268), G3676 (SEQ ID NO: 266), G3685 (SEQ ID NO: 274), G3001 (SEQ ID NO: 272), G3002 (SEQ ID NO: 290), G2998 (SEQ ID NO: 258), G2999 (SEQ ID NO: 256), G3000 (SEQ ID NO: 260), G3859 (SEQ ID NO: 414), G2992 (SEQ ID NO: 286), G2995 (SEQ ID NO: 288), G2991 (SEQ ID NO: 282), G2989 (SEQ ID NO: 280), G2990 (SEQ ID NO: 284), G3860 (SEQ ID NO: 418), G3861 (SEQ ID NO: 420), and G3681 (SEQ ID NO: 278).

[0047] FIGS. 21A-21J are a Clustal W-generated multiple sequence alignment of G2999 and related sequences. The vertical line identifies members of the G2999 clade. The box spanning FIGS. 21D-21E indicates the ZF domains of the sequences within the clade. The box spanning FIGS. 21H-21I indicates the HD domains of the sequences in the G2999 clade. Sequences shown in this alignment include G2997 (SEQ ID NO: 264), G2996 (SEQ ID NO: 270), G3676 (SEQ ID NO: 266), G3685 (SEQ ID NO: 274), G3686 (SEQ ID NO: 268), G3690 (SEQ ID NO: 262), G2993 (SEQ ID NO: 276), G2998 (SEQ ID NO: 258), G2999 (SEQ ID NO: 256), G3000 (SEQ ID NO: 260), G3001 (SEQ ID NO: 272), G3002 (SEQ ID NO: 290), G2989 (SEQ ID NO: 280), G2990 (SEQ ID NO: 284), G2991 (SEQ ID NO: 282), G2992 (SEQ ID NO: 286), G2995 (SEQ ID NO: 288), and G3681 (SEQ ID NO: 278).

[0048] FIG. 22 is a phylogenetic tree of G3086 and related fall length proteins, constructed using MEGA2 (http://www.megasoftware.net) software. A FastA formatted alignment was used to generate a phylogenetic tree in MEGA2 using the neighbor joining algorithm and a p-distance model. A test of phylogeny was done via bootstrap with 1000 replications and Random Seed set to default. Cut off values of the bootstrap tree were set to 50%. Orthologs of G3086 are considered as being those proteins within the node of the tree below with a bootstrap value of 92 (arrow), bounded by G3742 and G2555 (indicated by the large box). Sequences shown in this tree include G3742 (SEQ ID NO: 308), G3744 (SEQ ID NO: 300), G3755 (SEQ ID NO: 302), G592 (SEQ ID NO: 306), G3765 (SEQ ID NO: 314), G3766 (SEQ ID NO: 304), G3086 (SEQ ID NO: 292), G3769 (SEQ ID NO: 296), G3767 (SEQ ID NO: 298), G3768 (SEQ ID NO: 294), G3746 (SEQ ID NO: 310), G2766 (SEQ ID NO: 322), G2149 (SEQ ID NO: 320), G3772 (SEQ ID NO: 200), G3771 (SEQ ID NO: 312), G1134 (SEQ ID NO: 316), G2555 (SEQ ID NO: 318), G3750 (SEQ ID NO: 326), and G3760 (SEQ ID NO: 324).

[0049] FIGS. 23A-231 represent a Clustal W-generated multiple sequence alignment of G3086 and related sequences. The vertical line to the left of the alignment on each page identifies members of the G3086 clade. The box spanning FIGS. 23G-23H indicates a conserved domain found within the clade member sequences. An invariant leucine residue found in all bHLH proteins, indicated by the arrow in FIG. 23G, is required for protein dimerization. Sequences shown in this alignment include G2149 (SEQ ID NO: 320), G2766 (SEQ ID NO: 322), G3746 (SEQ ID NO: 310), G1134 (SEQ ID NO: 316), G2555 (SEQ ID NO: 318), G3771 (SEQ ID NO: 312), G3742 (SEQ ID NO: 308), G3755 (SEQ ID NO: 302), G3744 (SEQ ID NO: 300), G3767 (SEQ ID NO: 298), G3768 (SEQ ID NO: 294), G3769 (SEQ ID NO: 296), G3765 (SEQ ID NO: 314), G3766 (SEQ ID NO: 304), G592 (SEQ ID NO: 306), G3086 (SEQ ID NO: 292), G3750 (SEQ ID NO: 326) and G3760 (SEQ ID NO: 324).

### DETAILED DESCRIPTION

[0050] The present invention relates to polynucleotides and polypeptides for modifying phenotypes of plants, particularly those associated with increased biomass, increased disease resistance, and/or abiotic stress tolerance. Throughout this disclosure, various information sources are referred to and/or are specifically incorporated. The information sources include scientific journal articles, patent documents, textbooks, and World Wide Web browser-inactive page addresses. While the reference to these information sources clearly indicates that they can be used by one of skill in the art, each and every one of the information sources cited herein are specifically incorporated in their entirety, whether or not a specific mention of “incorporation by reference” is noted. The contents and teachings of each and every one of the information sources can be relied on and used to make and use embodiments of the invention.

[0051] As used herein and in the appended claims, the singular forms “a”, “an”, and “the” include the plural reference unless the context clearly dictates otherwise. Thus, for example, a reference to “a host cell” includes a plurality of such host cells, and a reference to “a stress” is a reference to one or more stresses and equivalents thereof known to those skilled in the art, and so forth.

### DEFINITIONS

[0052] “Nucleic acid molecule” refers to an oligonucleotide, polynucleotide or any fragment thereof. It may be DNA or RNA of genomic or synthetic origin, double-stranded or single-stranded, and combined with carbohydrate, lipids, protein, or other materials to perform a particular activity such as transformation or form a useful composition such as a peptide nucleic acid (PNA).

[0053] “Polynucleotide” is a nucleic acid molecule comprising a plurality of polymerized nucleotides, e.g., at least about 15 consecutive polymerized nucleotides. A polynucleotide may be a nucleic acid, oligonucleotide, nucleotide, or any fragment thereof. In many instances, a polynucleotide comprises a nucleotide sequence encoding a polypeptide (or protein) or a domain or fragment thereof. Additionally, the polynucleotide may comprise a promoter, an intron, an enhancer region, a polyadenylation site, a translation initiation site, 5′ or 3′ untranslated regions, a reporter gene, a selectable marker, or the like. The polynucleotide can be single-stranded or double-stranded DNA or RNA. The polynucleotide optionally comprises modified bases or a modified backbone. The polynucleotide can be, e.g., genomic DNA or RNA, a transcript (such as an mRNA), a cDNA, a PCR product, a cloned DNA, a synthetic DNA or RNA, or the like. The polynucleotide can be combined with carbohydrate, lipids, protein, or other materials to perform a particular activity such as transformation or form a useful composition such as a peptide nucleic acid (PNA). The polynucleotide can comprise a sequence in either sense or antisense orientations. “Oligonucleotide” is substantially equivalent to the terms amplimer, primer, oligomer, element, target, and probe and is preferably single-stranded.

[0054] “Gene” or “gene sequence” refers to the partial or complete coding sequence of a gene, its complement, and its 5′ or 3′ untranslated regions. A gene is also a functional unit of inheritance, and in physical terms is a particular segment or sequence of nucleotides along a molecule of DNA (or RNA, in the case of RNA viruses) involved in producing a polypeptide chain. The latter may be subjected to subsequent processing such as chemical modification or folding to obtain a functional protein or polypeptide. A gene may be isolated, partially isolated, or found with an organism's genome. By way of example, a transcription factor gene encodes a transcription factor polypeptide, which may be functional or require processing to function as an initiator of transcription.

[0055] Operationally, genes may be defined by the cis-trans test, a genetic test that determines whether two mutations occur in the same gene and that may be used to determine the limits of the genetically active unit (Rieger et al. (1976)). A gene generally includes regions preceding (“leaders”; upstream) and following (“trailers”; downstream) the coding region. A gene may also include intervening, non-coding sequences, referred to as “introns”, located between individual coding segments, referred to as “exons”. Most genes have an associated promoter region, a regulatory sequence 5′ of the transcription initiation codon (there are some genes that do not have an identifiable promoter). The function of a gene may also be regulated by enhancers, operators, and other regulatory elements.

[0056] A “recombinant polynucleotide” is a polynucleotide that is not in its native state, e.g., the polynucleotide comprises a nucleotide sequence not found in nature, or the polynucleotide is in a context other than that in which it is naturally found, e.g., separated from nucleotide sequences with which it typically is in proximity in nature, or adjacent (or contiguous with) nucleotide sequences with which it typically is not in proximity. For example, the sequence at issue can be cloned into a vector, or otherwise recombined with one or more additional nucleic acid.

[0057] An “isolated polynucleotide” is a polynucleotide, whether naturally occurring or recombinant, that is present outside the cell in which it is typically found in nature, whether purified or not. Optionally, an isolated polynucleotide is subject to one or more enrichment or purification procedures, e.g., cell lysis, extraction, centrifugation, precipitation, or the like.

[0058] A “polypeptide” is an amino acid sequence comprising a plurality of consecutive polymerized amino acid residues e.g., at least about 15 consecutive polymerized amino acid residues. In many instances, a polypeptide comprises a polymerized amino acid residue sequence that is a transcription factor or a domain or portion or fragment thereof. Additionally, the polypeptide may comprise: (i) a localization domain; (ii) an activation domain; (iii) a repression domain; (iv) an oligomerization domain; (v) a DNA-binding domain; or the like. The polypeptide optionally comprises modified amino acid residues, naturally occurring amino acid residues not encoded by a codon, non-naturally occurring amino acid residues.

[0059] “Protein” refers to an amino acid sequence, oligopeptide, peptide, polypeptide or portions thereof whether naturally occurring or synthetic.

[0060] “Portion”, as used herein, refers to any part of a protein used for any purpose, but especially for the screening of a library of molecules which specifically bind to that portion or for the production of antibodies.

[0061] A “recombinant polypeptide” is a polypeptide produced by translation of a recombinant polynucleotide. A “synthetic polypeptide” is a polypeptide created by consecutive polymerization of isolated amino acid residues using methods well known in the art. An “isolated polypeptide,” whether a naturally occurring or a recombinant polypeptide, is more enriched in (or out of) a cell than the polypeptide in its natural state in a wild-type cell, e.g., more than about 5% enriched, more than about 10% enriched, or more than about 20%, or more than about 50%, or more, enriched, i.e., alternatively denoted: 105%, 110%, 120%, 150% or more, enriched relative to wild type standardized at 100%. Such an enrichment is not the result of a natural response of a wild-type plant. Alternatively, or additionally, the isolated polypeptide is separated from other cellular components with which it is typically associated, e.g., by any of the various protein purification methods herein.

[0062] “Homology” refers to sequence similarity between a reference sequence and at least a fragment of a newly sequenced clone insert or its encoded amino acid sequence.

[0063] “Identity” or “similarity” refers to sequence similarity between two polynucleotide sequences or between two polypeptide sequences, with identity being a more strict comparison. The phrases “percent identity” and “% identity” refer to the percentage of sequence similarity found in a comparison of two or more polynucleotide sequences or two or more polypeptide sequences. “Sequence similarity” refers to the percent similarity in base pair sequence (as determined by any suitable method) between two or more polynucleotide sequences. Two or more sequences can be anywhere from 0-100% similar, or any integer value therebetween. Identity or similarity can be determined by comparing a position in each sequence that may be aligned for purposes of comparison. When a position in the compared sequence is occupied by the same nucleotide base or amino acid, then the molecules are identical at that position. A degree of similarity or identity between polynucleotide sequences is a function of the number of identical, matching or corresponding nucleotides at positions shared by the polynucleotide sequences. A degree of identity of polypeptide sequences is a function of the number of identical amino acids at corresponding positions shared by the polypeptide sequences. A degree of homology or similarity of polypeptide sequences is a function of the number of amino acids at corresponding positions shared by the polypeptide sequences.

[0064] “Alignment” refers to a number of nucleotide bases or amino acid residue sequences aligned by lengthwise comparison so that components in common (i.e., nucleotide bases or amino acid residues at corresponding positions) may be visually and readily identified. The fraction or percentage of components in common is related to the homology or identity between the sequences. Alignments such as those of FIGS. 3A-3F may be used to identify conserved domains and relatedness within these domains. An alignment may suitably be determined by means of computer programs known in the art, such as MACVECTOR software (1999) (Accelrys, Inc., San Diego, Calif.).

[0065] A “conserved domain” or “conserved region” as used herein refers to a region in heterologous polynucleotide or polypeptide sequences where there is a relatively high degree of sequence identity between the distinct sequences. For example, an “AT-hook” domain”, such as is found in a polypeptide member of AT-hook transcription factor family, is an example of a conserved domain. An “AP2” domain”, such as is found in a polypeptide member of AP2 transcription factor family, is another example of a conserved domain. With respect to polynucleotides encoding presently disclosed transcription factors, a conserved domain is preferably at least nine base pairs (bp) in length. A conserved domain with respect to presently disclosed polypeptides refers to a domain within a transcription factor family that exhibits a higher degree of sequence homology, such as at least about 38% sequence identity including conservative substitutions, or at least about 55% sequence identity, or at least about 62% sequence identity, or at least about 65%, or at least about 70%, or at least about 75%, or at least about 78%, or at least about 80%, or at least about 82%, or at least about 85%, %, or at least about 90%, or at least about 95%, amino acid residue sequence identity, to a conserved domain of a polypeptide of the invention. Sequences that possess or encode for conserved domains that meet these criteria of percentage identity, and that have comparable biological activity to the present transcription factor sequences, thus being members of the G1073 clade of transcription factor polypeptides, are encompassed by the invention. A fragment or domain can be referred to as outside a conserved domain, outside a consensus sequence, or outside a consensus DNA-binding site that is known to exist or that exists for a particular transcription factor class, family, or sub-family. In this case, the fragment or domain will not include the exact amino acids of a consensus sequence or consensus DNA-binding site of a transcription factor class, family or sub-family, or the exact amino acids of a particular transcription factor consensus sequence or consensus DNA-binding site. Furthermore, a particular fragment, region, or domain of a polypeptide, or a polynucleotide encoding a polypeptide, can be “outside a conserved domain” if all the amino acids of the fragment, region, or domain fall outside of a defined conserved domain(s) for a polypeptide or protein. Sequences having lesser degrees of identity but comparable biological activity are considered to be equivalents.

[0066] As one of ordinary skill in the art recognizes, conserved domains may be identified as regions or domains of identity to a specific consensus sequence (see, for example, Riechmann et al. (2000a, 2000b)). Thus, by using alignment methods well known in the art, the conserved domains of the plant transcription factors, for example, for the AT-hook proteins (Reeves and Beckerbauer (2001); and Reeves (2001)), may be determined.

[0067] The conserved domains for many of the transcription factor sequences of the invention are listed in Tables 8-17. Also, the polypeptides of Tables 8-17 have conserved domains specifically indicated by amino acid coordinate start and stop sites. A comparison of the regions of these polypeptides allows one of skill in the art (see, for example, Reeves and Nissen (1995)) to identify domains or conserved domains for any of the polypeptides listed or referred to in this disclosure.

[0068] “Complementary” refers to the natural hydrogen bonding by base pairing between purines and pyrimidines. For example, the sequence A-C-G-T (5′->3′) forms hydrogen bonds with its complements A-C-G-T (5′->3′) or A-C-G-U (5′->3′). Two single-stranded molecules may be considered partially complementary, if only some of the nucleotides bond, or “completely complementary” if all of the nucleotides bond. The degree of complementarity between nucleic acid strands affects the efficiency and strength of hybridization and amplification reactions. “Fully complementary” refers to the case where bonding occurs between every base pair and its complement in a pair of sequences, and the two sequences have the same number of nucleotides.

[0069] The terms “highly stringent” or “highly stringent condition” refer to conditions that permit hybridization of DNA strands whose sequences are highly complementary, wherein these same conditions exclude hybridization of significantly mismatched DNAs. Polynucleotide sequences capable of hybridizing under stringent conditions with the polynucleotides of the present invention may be, for example, variants of the disclosed polynucleotide sequences, including allelic or splice variants, or sequences that encode orthologs or paralogs of presently disclosed polypeptides. Nucleic acid hybridization methods are disclosed in detail by Kashima et al. (1985), Sambrook et al. (1989), and by Haymes et al. (1985), which references are incorporated herein by reference.

[0070] In general, stringency is determined by the temperature, ionic strength, and concentration of denaturing agents (e.g., formamide) used in a hybridization and washing procedure (for a more detailed description of establishing and determining stringency, see the section “Identifying Polynucleotides or Nucleic Acids by Hybridization”, below). The degree to which two nucleic acids hybridize under various conditions of stringency is correlated with the extent of their similarity. Thus, similar nucleic acid sequences from a variety of sources, such as within a plant's genome (as in the case of paralogs) or from another plant (as in the case of orthologs) that may perform similar functions can be isolated on the basis of their ability to hybridize with known transcription factor sequences. Numerous variations are possible in the conditions and means by which nucleic acid hybridization can be performed to isolate transcription factor sequences having similarity to transcription factor sequences known in the art and are not limited to those explicitly disclosed herein. Such an approach may be used to isolate polynucleotide sequences having various degrees of similarity with disclosed transcription factor sequences, such as, for example, encoded transcription factors having 38% or greater identity with the conserved domain of disclosed transcription factors.

[0071] The terms “paralog” and “ortholog” are defined below in the section entitled “Orthologs and Paralogs”. In brief, orthologs and paralogs are evolutionarily related genes that have similar sequences and functions. Orthologs are structurally related genes in different species that are derived by a speciation event. Paralogs are structurally related genes within a single species that are derived by a duplication event.

[0072] The term “equivalog” describes members of a set of homologous proteins that are conserved with respect to function since their last common ancestor. Related proteins are grouped into equivalog families, and otherwise into protein families with other hierarchically defined homology types. This definition is provided at the Institute for Genomic Research (TIGR) World Wide Web (www) website, “tigr.org” under the heading “Terms associated with TIGRFAMs”.

[0073] In general, the term “variant” refers to molecules with some differences, generated synthetically or naturally, in their base or amino acid sequences as compared to a reference (native) polynucleotide or polypeptide, respectively. These differences include substitutions, insertions, deletions or any desired combinations of such changes in a native polynucleotide of amino acid sequence.

[0074] With regard to polynucleotide variants, differences between presently disclosed polynucleotides and polynucleotide variants are limited so that the nucleotide sequences of the former and the latter are closely similar overall and, in many regions, identical. Due to the degeneracy of the genetic code, differences between the former and latter nucleotide sequences may be silent (i.e., the amino acids encoded by the polynucleotide are the same, and the variant polynucleotide sequence encodes the same amino acid sequence as the presently disclosed polynucleotide. Variant nucleotide sequences may encode different amino acid sequences, in which case such nucleotide differences will result in amino acid substitutions, additions, deletions, insertions, truncations or fusions with respect to the similar disclosed polynucleotide sequences. These variations may result in polynucleotide variants encoding polypeptides that share at least one functional characteristic. The degeneracy of the genetic code also dictates that many different variant polynucleotides can encode identical and/or substantially similar polypeptides in addition to those sequences illustrated in the Sequence Listing.

[0075] Also within the scope of the invention is a variant of a transcription factor nucleic acid listed in the Sequence Listing, that is, one having a sequence that differs from the one of the polynucleotide sequences in the Sequence Listing, or a complementary sequence, that encodes a functionally equivalent polypeptide (i.e., a polypeptide having some degree of equivalent or similar biological activity) but differs in sequence from the sequence in the Sequence Listing, due to degeneracy in the genetic code. Included within this definition are polymorphisms that may or may not be readily detectable using a particular oligonucleotide probe of the polynucleotide encoding polypeptide, and improper or unexpected hybridization to allelic variants, with a locus other than the normal chromosomal locus for the polynucleotide sequence encoding polypeptide.

[0076] “Allelic variant” or “polynucleotide allelic variant” refers to any of two or more alternative forms of a gene occupying the same chromosomal locus. Allelic variation arises naturally through mutation, and may result in phenotypic polymorphism within populations. Gene mutations may be “silent” or may encode polypeptides having altered amino acid sequence. “Allelic variant” and “polypeptide allelic variant” may also be used with respect to polypeptides, and in this case the terms refer to a polypeptide encoded by an allelic variant of a gene.

[0077] “Splice variant” or “polynucleotide splice variant” as used herein refers to alternative forms of RNA transcribed from a gene. Splice variation naturally occurs as a result of alternative sites being spliced within a single transcribed RNA molecule or between separately transcribed RNA molecules, and may result in several different forms of mRNA transcribed from the same gene. Thus, splice variants may encode polypeptides having different amino acid sequences, which may or may not have similar functions in the organism. “Splice variant” or “polypeptide splice variant” may also refer to a polypeptide encoded by a splice variant of a transcribed mRNA.

[0078] As used herein, “polynucleotide variants” may also refer to polynucleotide sequences that encode paralogs and orthologs of the presently disclosed polypeptide sequences. “Polypeptide variants” may refer to polypeptide sequences that are paralogs and orthologs of the presently disclosed polypeptide sequences.

[0079] Differences between presently disclosed polypeptides and polypeptide variants are limited so that the sequences of the former and the latter are closely similar overall and, in many regions, identical. Presently disclosed polypeptide sequences and similar polypeptide variants may differ in amino acid sequence by one or more substitutions, additions, deletions, fusions and truncations, which may be present in any combination. These differences may produce silent changes and result in a functionally equivalent transcription factor. Thus, it will be readily appreciated by those of skill in the art, that any of a variety of polynucleotide sequences is capable of encoding the transcription factors and transcription factor homolog polypeptides of the invention. A polypeptide sequence variant may have “conservative” changes, wherein a substituted amino acid has similar structural or chemical properties. Deliberate amino acid substitutions may thus be made on the basis of similarity in polarity, charge, solubility, hydrophobicity, hydrophilicity, and/or the amphipathic nature of the residues, as long as a significant amount of the functional or biological activity of the transcription factor is retained. For example, negatively charged amino acids may include aspartic acid and glutamic acid, positively charged amino acids may include lysine and arginine, and amino acids with uncharged polar head groups having similar hydrophilicity values may include leucine, isoleucine, and valine; glycine and alanine; asparagine and glutamine; serine and threonine; and phenylalanine and tyrosine. More rarely, a variant may have “non-conservative” changes, e.g., replacement of a glycine with a tryptophan. Similar minor variations may also include amino acid deletions or insertions, or both. Related polypeptides may comprise, for example, additions and/or deletions of one or more N-linked or O-linked glycosylation sites, or an addition and/or a deletion of one or more cysteine residues. Guidance in determining which and how many amino acid residues may be substituted, inserted or deleted without abolishing functional or biological activity may be found using computer programs well known in the art, for example, DNASTAR software (see U.S. Pat. No. 5,840,544).

[0080] “Fragment”, with respect to a polynucleotide, refers to a clone or any part of a polynucleotide molecule that retains a usable, functional characteristic. Useful fragments include oligonucleotides and polynucleotides that may be used in hybridization or amplification technologies or in the regulation of replication, transcription or translation. A “polynucleotide fragment” refers to any subsequence of a polynucleotide, typically, of at least about 9 consecutive nucleotides, preferably at least about 30 nucleotides, more preferably at least about 50 nucleotides, of any of the sequences provided herein. Exemplary polynucleotide fragments are the first sixty consecutive nucleotides of the transcription factor polynucleotides listed in the Sequence Listing. Exemplary fragments also include fragments that comprise a region that encodes an conserved domain of a transcription factor. Exemplary fragments also include fragments that comprise a conserved domain of a transcription factor. Exemplary fragments include fragments that comprise an conserved domain of a transcription factor, for example, amino acid residues 33-77 of G682 (SEQ ID NO: 60).

[0081] Fragments may also include subsequences of polypeptides and protein molecules, or a subsequence of the polypeptide. Fragments may have uses in that they may have antigenic potential. In some cases, the fragment or domain is a subsequence of the polypeptide which performs at least one biological function of the intact polypeptide in substantially the same manner, or to a similar extent, as does the intact polypeptide. For example, a polypeptide fragment can comprise a recognizable structural motif or functional domain such as a DNA-binding site or domain that binds to a DNA promoter region, an activation domain, or a domain for protein-protein interactions, and may initiate transcription. Fragments can vary in size from as few as 3 amino acid residues to the full length of the intact polypeptide, but are preferably at least about 30 amino acid residues in length and more preferably at least about 60 amino acid residues in length.

[0082] The invention also encompasses production of DNA sequences that encode transcription factors and transcription factor derivatives, or fragments thereof, entirely by synthetic chemistry. After production, the synthetic sequence may be inserted into any of the many available expression vectors and cell systems using reagents well known in the art. Moreover, synthetic chemistry may be used to introduce mutations into a sequence encoding transcription factors or any fragment thereof.

[0083] “Derivative” refers to the chemical modification of a nucleic acid molecule or amino acid sequence. Chemical modifications can include replacement of hydrogen by an alkyl, acyl, or amino group or glycosylation, pegylation, or any similar process that retains or enhances biological activity or lifespan of the molecule or sequence.

[0084] The term “plant” includes whole plants, shoot vegetative organs/structures (for example, leaves, stems and tubers), roots, flowers and floral organs/structures (for example, bracts, sepals, petals, stamens, carpels, anthers and ovules), seed (including embryo, endosperm, and seed coat) and fruit (the mature ovary), plant tissue (for example, vascular tissue, ground tissue, and the like) and cells (for example, guard cells, egg cells, and the like), and progeny of same. The class of plants that can be used in the method of the invention is generally as broad as the class of higher and lower plants amenable to transformation techniques, including angiosperms (monocotyledonous and dicotyledonous plants), gymnosperms, ferns, horsetails, psilophytes, lycophytes, bryophytes, and multicellular algae.

[0085] A “control plant” as used in the present invention refers to a plant cell, seed, plant component, plant tissue, plant organ or whole plant used to compare against transgenic or genetically modified plant for the purpose of identifying an enhanced phenotype in the transgenic or genetically modified plant. A control plant may in some cases be a transgenic plant line that comprises an empty vector or marker gene, but does not contain the recombinant polynucleotide of the present invention that is expressed in the transgenic or genetically modified plant being evaluated. In general, a control plant is a plant of the same line or variety as the transgenic or genetically modified plant being tested. A suitable control plant would include a genetically unaltered or non-transgenic plant of the parental line used to generate a transgenic plant herein.

[0086] A “transgenic plant” refers to a plant that contains genetic material not found in a wild-type plant of the same species, variety or cultivar. The genetic material may include a transgene, an insertional mutagenesis event (such as by transposon or T-DNA insertional mutagenesis), an activation tagging sequence, a mutated sequence, a homologous recombination event or a sequence modified by chimeraplasty. Typically, the foreign genetic material has been introduced into the plant by human manipulation, but any method can be used as one of skill in the art recognizes.

[0087] A transgenic plant may contain an expression vector or cassette. The expression cassette typically comprises a polypeptide-encoding sequence operably linked (i.e., under regulatory control of) to appropriate inducible or constitutive regulatory sequences that allow for the controlled expression of polypeptide. The expression cassette can be introduced into a plant by transformation or by breeding after transformation of a parent plant. A plant refers to a whole plant as well as to a plant part, such as seed, fruit, leaf, or root, plant tissue, plant cells or any other plant material, e.g., a plant explant, as well as to progeny thereof, and to in vitro systems that mimic biochemical or cellular components or processes in a cell.

[0088] “Wild type” or “wild-type”, as used herein, refers to a plant cell, seed, plant component, plant tissue, plant organ or whole plant that has not been genetically modified or treated in an experimental sense. Wild-type cells, seed, components, tissue, organs or whole plants may be used as controls to compare levels of expression and the extent and nature of trait modification with cells, tissue or plants of the same species in which a transcription factor expression is altered, e.g., in that it has been knocked out, overexpressed, or ectopically expressed.

[0089] A “trait” refers to a physiological, morphological, biochemical, or physical characteristic of a plant or particular plant material or cell. In some instances, this characteristic is visible to the human eye, such as seed or plant size, or can be measured by biochemical techniques, such as detecting the protein, starch, or oil content of seed or leaves, or by observation of a metabolic or physiological process, e.g. by measuring tolerance to water deprivation or particular salt or sugar concentrations, or by the observation of the expression level of a gene or genes, e.g., by employing Northern analysis, RT-PCR, microarray gene expression assays, or reporter gene expression systems, or by agricultural observations such as hyperosmotic stress tolerance or yield. Any technique can be used to measure the amount of, comparative level of, or difference in any selected chemical compound or macromolecule in the transgenic plants, however.

[0090] “Trait modification” refers to a detectable difference in a characteristic in a plant ectopically expressing a polynucleotide or polypeptide of the present invention relative to a plant not doing so, such as a wild-type plant. In some cases, the trait modification can be evaluated quantitatively. For example, the trait modification can entail at least about a 2% increase or decrease, or an even greater difference, in an observed trait as compared with a control or wild-type plant. It is known that there can be a natural variation in the modified trait. Therefore, the trait modification observed entails a change of the normal distribution and magnitude of the trait in the plants as compared to control or wild-type plants.

[0091] When two or more plants have “similar morphologies”, “substantially similar morphologies”, “a morphology that is substantially similar”, or are “morphologically similar”, the plants have comparable forms or appearances, including analogous features such as overall dimensions, height, width, mass, root mass, shape, glossiness, color, stem diameter, leaf size, leaf dimension, leaf density, internode distance, branching, root branching, number and form of inflorescences, and other macroscopic characteristics, and the individual plants are not readily distinguishable based on morphological characteristics alone.

[0092] “Modulates” refers to a change in activity (biological, chemical, or immunological) or lifespan resulting from specific binding between a molecule and either a nucleic acid molecule or a protein.

[0093] The term “transcript profile” refers to the expression levels of a set of genes in a cell in a particular state, particularly by comparison with the expression levels of that same set of genes in a cell of the same type in a reference state. For example, the transcript profile of a particular transcription factor in a suspension cell is the expression levels of a set of genes in a cell knocking out or overexpressing that transcription factor compared with the expression levels of that same set of genes in a suspension cell that has normal levels of that transcription factor. The transcript profile can be presented as a list of those genes whose expression level is significantly different between the two treatments, and the difference ratios. Differences and similarities between expression levels may also be evaluated and calculated using statistical and clustering methods.

[0094] With regard to transcription factor gene knockouts as used herein, the term “knockout” refers to a plant or plant cell having a disruption in at least one transcription factor gene in the plant or cell, where the disruption results in a reduced expression or activity of the transcription factor encoded by that gene compared to a control cell. The knockout can be the result of, for example, genomic disruptions, including transposons, tilling, and homologous recombination, antisense constructs, sense constructs, RNA silencing constructs, or RNA interference. A T-DNA insertion within a transcription factor gene is an example of a genotypic alteration that may abolish expression of that transcription factor gene.

[0095] “Ectopic expression or altered expression” in reference to a polynucleotide indicates that the pattern of expression in, e.g., a transgenic plant or plant tissue, is different from the expression pattern in a wild-type plant or a reference plant of the same species. The pattern of expression may also be compared with a reference expression pattern in a wild-type plant of the same species. For example, the polynucleotide or polypeptide is expressed in a cell or tissue type other than a cell or tissue type in which the sequence is expressed in the wild-type plant, or by expression at a time other than at the time the sequence is expressed in the wild-type plant, or by a response to different inducible agents, such as hormones or environmental signals, or at different expression levels (either higher or lower) compared with those found in a wild-type plant. The term also refers to altered expression patterns that are produced by lowering the levels of expression to below the detection level or completely abolishing expression. The resulting expression pattern can be transient or stable, constitutive or inducible. In reference to a polypeptide, the term “ectopic expression or altered expression” further may relate to altered activity levels resulting from the interactions of the polypeptides with exogenous or endogenous modulators or from interactions with factors or as a result of the chemical modification of the polypeptides.

[0096] The term “overexpression” as used herein refers to a greater expression level of a gene in a plant, plant cell or plant tissue, compared to expression in a wild-type plant, cell or tissue, at any developmental or temporal stage for the gene. Overexpression can occur when, for example, the genes encoding one or more transcription factors are under the control of a strong promoter (e.g., the cauliflower mosaic virus 35S transcription initiation region). Overexpression may also under the control of an inducible or tissue specific promoter. Thus, overexpression may occur throughout a plant, in specific tissues of the plant, or in the presence or absence of particular environmental signals, depending on the promoter used.

[0097] Overexpression may take place in plant cells normally lacking expression of polypeptides functionally equivalent or identical to the present transcription factors. Overexpression may also occur in plant cells where endogenous expression of the present transcription factors or functionally equivalent molecules normally occurs, but such normal expression is at a lower level. Overexpression thus results in a greater than normal production, or “overproduction” of the transcription factor in the plant, cell or tissue.

[0098] The term “transcription regulating region” refers to a DNA regulatory sequence that regulates expression of one or more genes in a plant when a transcription factor having one or more specific binding domains binds to the DNA regulatory sequence. Transcription factors of the present invention possess an conserved domain. The transcription factors of the invention also comprise an amino acid subsequence that forms a transcription activation domain that regulates expression of one or more abiotic stress tolerance genes in a plant when the transcription factor binds to the regulating region.

### DESCRIPTION OF THE SPECIFIC EMBODIMENTS

### Transcription Factors Modify Expression of Endogenous Genes

[0099] A transcription factor may include, but is not limited to, any polypeptide that can activate or repress transcription of a single gene or a number of genes. As one of ordinary skill in the art recognizes, transcription factors can be identified by the presence of a region or domain of structural similarity or identity to a specific consensus sequence or the presence of a specific consensus DNA-binding site or DNA-binding site motif (see, for example, Riechmann et al. (2000a)). The plant transcription factors of the present invention belong to the AT-hook transcription factor family (Reeves and Beckerbauer (2001); and Reeves (2001)).

[0100] Generally, the transcription factors encoded by the present sequences are involved in cell differentiation and proliferation and the regulation of growth. Accordingly, one skilled in the art would recognize that by expressing the present sequences in a plant, one may change the expression of autologous genes or induce the expression of introduced genes. By affecting the expression of similar autologous sequences in a plant that have the biological activity of the present sequences, or by introducing the present sequences into a plant, one may alter a plant's phenotype to one with improved traits related to osmotic stresses. The sequences of the invention may also be used to transform a plant and introduce desirable traits not found in the wild-type cultivar or strain. Plants may then be selected for those that produce the most desirable degree of over- or under-expression of target genes of interest and coincident trait improvement.

[0101] The sequences of the present invention may be from any species, particularly plant species, in a naturally occurring form or from any source whether natural, synthetic, semi-synthetic or recombinant. The sequences of the invention may also include fragments of the present amino acid sequences. Where “amino acid sequence” is recited to refer to an amino acid sequence of a naturally occurring protein molecule, “amino acid sequence” and like terms are not meant to limit the amino acid sequence to the complete native amino acid sequence associated with the recited protein molecule.

[0102] In addition to methods for modifying a plant phenotype by employing one or more polynucleotides and polypeptides of the invention described herein, the polynucleotides and polypeptides of the invention have a variety of additional uses. These uses include their use in the recombinant production (i.e., expression) of proteins; as regulators of plant gene expression, as diagnostic probes for the presence of complementary or partially complementary nucleic acids (including for detection of natural coding nucleic acids); as substrates for further reactions, e.g., mutation reactions, PCR reactions, or the like; as substrates for cloning e.g., including digestion or ligation reactions; and for identifying exogenous or endogenous modulators of the transcription factors. The polynucleotide can be, e.g., genomic DNA or RNA, a transcript (such as an mRNA), a cDNA, a PCR product, a cloned DNA, a synthetic DNA or RNA, or the like. The polynucleotide can comprise a sequence in either sense or antisense orientations.

[0103] Expression of genes that encode transcription factors that modify expression of endogenous genes, polynucleotides, and proteins are well known in the art. In addition, transgenic plants comprising isolated polynucleotides encoding transcription factors may also modify expression of endogenous genes, polynucleotides, and proteins. Examples include Peng et al. (1997) and Peng et al. (1999). In addition, many others have demonstrated that an Arabidopsis transcription factor expressed in an exogenous plant species elicits the same or very similar phenotypic response. See, for example, Fu et al. (2001); Nandi et al. (2000); Coupland (1995); and Weigel and Nilsson (1995)).

[0104] In another example, Mandel et al. (1992), and Suzuki et al. (2001), teach that a transcription factor expressed in another plant species elicits the same or very similar phenotypic response of the endogenous sequence, as often predicted in earlier studies of Arabidopsis transcription factors in Arabidopsis (see Mandel et al. (1992); Suzuki et al. (2001)). Other examples include Müller et al. (2001); Kim et al. (2001); Kyozuka and Shimamoto (2002); Boss and Thomas (2002); He et al. (2000); and Robson et al. (2001).

[0105] In yet another example, Gilmour et al. (1998) teach an Arabidopsis AP2 transcription factor, CBF1, which, when overexpressed in transgenic plants, increases plant freezing tolerance. Jaglo et al. (2001) further identified sequences in Brassica napus which encode CBF-like genes and that transcripts for these genes accumulated rapidly in response to low temperature. Transcripts encoding CBF-like proteins were also found to accumulate rapidly in response to low temperature in wheat, as well as in tomato. An alignment of the CBF proteins from Arabidopsis, B. napus, wheat, rye, and tomato revealed the presence of conserved consecutive amino acid residues, PKK/RPAGRxKFxETRIP and DSAWR, which bracket the AP2/EREBP DNA binding domains of the proteins and distinguish them from other members of the AP2/EREBP protein family. (Jaglo et al. (2001))

[0106] Transcription factors mediate cellular responses and control traits through altered expression of genes containing cis-acting nucleotide sequences that are targets of the introduced transcription factor. It is well appreciated in the art that the effect of a transcription factor on cellular responses or a cellular trait is determined by the particular genes whose expression is either directly or indirectly (e.g., by a cascade of transcription factor binding events and transcriptional changes) altered by transcription factor binding. In a global analysis of transcription comparing a standard condition with one in which a transcription factor is overexpressed, the resulting transcript profile associated with transcription factor overexpression is related to the trait or cellular process controlled by that transcription factor. For example, the PAP2 gene and other genes in the MYB family have been shown to control anthocyanin biosynthesis through regulation of the expression of genes known to be involved in the anthocyanin biosynthetic pathway (Bruce et al. (2000); and Borevitz et al. (2000)). Further, global transcript profiles have been used successfully as diagnostic tools for specific cellular states (e.g., cancerous vs. non-cancerous; Bhattachaijee et al. (2001); and Xu et al. (2001)). Consequently, it is evident to one skilled in the art that similarity of transcript profile upon overexpression of different transcription factors would indicate similarity of transcription factor function.

[0107] Polypeptides and Polyucleotides of the Invention

[0108] The present invention provides, among other things, transcription factors (TFs), and transcription factor homolog polypeptides, and isolated or recombinant polynucleotides encoding the polypeptides, or novel sequence variant polypeptides or polynucleotides encoding novel variants of transcription factors derived from the specific sequence provided in the Sequence Listing. Also provided are methods for modifying a plant's biomass by modifying the size or number of leaves or seed of a plant by controlling a number of cellular processes, and for increasing a plant's resistance or tolerance to disease or abiotic stresses, respectively. These methods are based on the ability to alter the expression of critical regulatory molecules that may be conserved between diverse plant species. Related conserved regulatory molecules may be originally discovered in a model system such as Arabidopsis and homologous, functional molecules then discovered in other plant species. The latter may then be used to confer increased biomass, disease resistance or abiotic stress tolerance in diverse plant species.

[0109] Exemplary polynucleotides encoding the polypeptides of the invention were identified in the Arabidopsis thaliana GenBank database using publicly available sequence analysis programs and parameters. Sequences initially identified were then further characterized to identify sequences comprising specified sequence strings corresponding to sequence motifs present in families of known transcription factors. In addition, further exemplary polynucleotides encoding the polypeptides of the invention were identified in the plant GenBank database using publicly available sequence analysis programs and parameters. Sequences initially identified were then further characterized to identify sequences comprising specified sequence strings corresponding to sequence motifs present in families of known transcription factors. Polynucleotide sequences meeting such criteria were confirmed as transcription factors.

[0110] Additional polynucleotides of the invention were identified by screening Arabidopsis thaliana and/or other plant cDNA libraries with probes corresponding to known transcription factors under low stringency hybridization conditions. Additional sequences, including full length coding sequences, were subsequently recovered by the rapid amplification of cDNA ends (RACE) procedure using a commercially available kit according to the manufacturer's instructions. Where necessary, multiple rounds of RACE are performed to isolate 5′ and 3′ ends. The full-length cDNA was then recovered by a routine end-to-end polymerase chain reaction (PCR) using primers specific to the isolated 5′ and 3′ ends. Exemplary sequences are provided in the Sequence Listing.

[0111] Many of the sequences in the Sequence Listing, derived from diverse plant species, have been ectopically expressed in overexpressor plants. The changes in the characteristic(s) or trait(s) of the plants were then observed and found to confer increased disease resistance, increase biomass and/or increased abiotic stress tolerance. Therefore, the polynucleotides and polypeptides can be used to improve desirable characteristics of plants.

[0112] The polynucleotides of the invention were also ectopically expressed in overexpressor plant cells and the changes in the expression levels of a number of genes, polynucleotides, and/or proteins of the plant cells observed. Therefore, the polynucleotides and polypeptides can be used to change expression levels of a genes, polynucleotides, and/or proteins of plants or plant cells.

### DESCRIPTION OF THE SPECIFIC EMBODIMENTS

[0113] The data presented herein represent the results obtained in experiments with transcription factor polynucleotides and polypeptides that may be expressed in plants for the purpose of reducing yield losses that arise from biotic and abiotic stress.

### Background Information for the G482 Clade, Including G481 and Related Sequences

[0114] G481 (SEQ ID NOs: 1 and 2; AT2G38880; also known as HAP3A and AT-YB1) from Arabidopsis is a member of the HAP3/NF-YB sub-group of the CCAAT binding factor family (CCAAT) of transcription factors (FIG. 2). This gene was included based on the resistance to drought-related abiotic stress exhibited by 35S::G481 lines. The major goal of the current program is to define the mechanisms by which G481 confers drought tolerance, and to determine the extent to which other proteins from the CCAAT family, both in Arabidopsis and other plant species, have similar functions.

[0115] Structural features and assembly of the NF-Y subunits. NF-Y is one of the most heavily studied transcription factor complexes and an extensive literature has accumulated regarding its structure, regulation, and putative roles in various different organisms. Each of the three subunits comprises a region which has been evolutionarily conserved (Li et al. (1992); Mantovani (1999)). In the NF-YA subunits, this conserved region is at the C-terminus, in the NF-YB proteins it is centrally located, and in the NF-YC subunits it is at the N-terminus. The NF-YA and NF-YC subunits also have regions which are rich in glutamine (Q) residues that also show some degree of conservation; these Q-rich regions have an activation domain function. In fact it has been shown that NF-Y contains two transcription activation domains: a glutamine-rich, serine-threonine-rich domain present in the CBF-B (HAP2, NF-YA) subunit and a glutamine-rich domain in the CBF-C (HAP5, CBF-C) subunit (Coustry et al. (1995); Coustry et al. (1996); Coustry et al. (1998); Coustry et al. (2001)). In yeast, Q-regions are not present in the NF-Y subunits and the activation function is thought to be provided by an acidic region in HAP4 (Forsburg and Guarente (1989); Olesen and Guarente (1990); McNabb et al. (1997)), the subunit that is absent from mammals.

[0116] The NF-YB and NF-YC subunits bear some similarity to histones; the conserved regions of both these subunits contain a histone fold motif (HFM), which is an ancient domain of ˜65 amino acids. The HFM has a high degree of structural conservation across all histones and comprises three or four α-helices (four in the case of the NF-Y subunits) which are separated by short loops (L)/strand regions (Arents and Moudrianakis (1995)). In the histones, this HFM domain mediates dimerization and formation of non sequence-specific interactions with DNA (Arents and Moudrianakis (1995)).

[0117] Considerable knowledge has now accumulated regarding the biochemistry of NF-Y subunit association and DNA binding. The NF-YB-NF-YC subunits first form a tight dimer, which offers a complex surface for NF-YA association. The resulting trimer can then bind to DNA with high specificity and affinity (Kim and Sheffrey (1990); Bi et al. (1997); Mantovani (1999)). In addition to the NF-Y subunits themselves, a number of other proteins have been implicated in formation of the complex (Mantovani (1999)).

[0118] Using approaches such as directed mutagenesis, specific regions of the NF-Y proteins have been altered and inferences made about their specific role. In particular, it is has been found that the HFMs of NF-YB and NF-YC are critical for dimer formation, NF-YA association and CCAAT-binding (Sinha et al. (1996); Kim et al. (1996); Xing et al. (1993); Maity and de Crombrugghe (1998)). Specific amino acids in α2, L2 and α3 are required for dimerization between the NF-YB and NF-YC subunits. For NF-YA association, two conserved amino acids in α2 from NF-YB and several residues in NF-YC, within α1, α2 and at the C-terminus of α3 are required. For DNA binding, which is the most difficult feature to address since the two other functions need to be intact, the α1 and α2 of NF-YB and the α1 of NF-YC are necessary. These latter results do not rule out that other parts of the HFMs are necessary to make the trimer bind to DNA; most notably the positively charged residues in L2 may have such a role, as in histones (Luger et al. (1997); Mantovani (1999)).

[0119] Most of the sequence specific interactions within the NF-Y trimer appear to be conferred by NF-YA. In contrast to the B and C subunits, the conserved domain in the A subunit does not bear any resemblance to histones or any other well-characterized DNA-binding motif. However, like the B and C subunits, the A subunit has also been subject to saturation mutagenesis. The NF-YA conserved domain appears to comprise two distinct halves, each of ˜20 amino acids; the N-terminal part of the conserved domain is required for association with the BC dimer, whereas the C-terminal portion of the NF-YA conserved domain is needed for DNA binding (Mantovani (1999)), Further structural insights into the function of NF-Y have now been obtained following solution of the crystal structure of the BC dimer (Romier et al. (2003)). This confirmed the role of the HFM motifs and the role of the conserved regions of NF-YA; a model for DNA interactions suggests that the NF-YA subunit binds the CCAAT box while the B and C subunits bend the DNA (Romier et al. (2003)).

[0120] There is very little sequence similarity between HAP3 proteins in the A and C domains; it is therefore reasonable to assume that the A and C domains could provide a degree of functional specificity to each member of the HAP3 subfamily. The B domain is the conserved region that specifies DNA binding and subunit association.

[0121] In FIGS. 3A-3F, HAP3 proteins from Arabidopsis, soybean, rice and corn are aligned with G481. The B domain of the non-LEC1-like clade (identified in the box spanning FIGS. 3B-3C) may be distinguished by the comprised amino acid residues:

Asn-(Xaa)₄₋₁₁-Lys-(Xaa)₃₃₋₃₄-Asn-Gly-(Xaa)₂-Leu;

[0122] where Xaa can be any amino acid. These residues in their present positions are uniquely found in the non-LEC1-like clade, and may be used to identify members of this clade.

[0123] The G482 subclade is distinguished by a B-domain comprising:

Ser/Glu-(Xaa)₉-Asn-(Xaa)₄₋₁₁-Lys-(Xaa)₃₃₋₃₄-Asn-
Gly-(Xaa)₂-Leu.

[0124] Plant CCAAT binding factors are regulated at the level of transcription. In contrast to the NF-Y genes from mammals, members of the CCAAT family from Arabidopsis appear to be heavily regulated at the level of RNA abundance. Surveys of expression patterns of Arabidopsis CCAAT family members from a number of different studies have revealed complex patterns of expression, with some family members being specific to particular tissue types or conditions (Edwards et al. (1998); Gusmaroli et al. (2001); Gusmaroli et al. (2002)). During previous genomics studies, we also found that the expression patterns of many of the HAP-like genes in Arabidopsis were suggestive of developmental and/or conditional regulation. In particular LEC1 (G6201, SEQ ID NO: 357) and L1L (G1821, SEQ ID NO: 358) were very strongly expressed in siliques and embryos relative to other tissues. We used RT-PCR to analyze the endogenous expression of 31 of the 36 CCAAT-box genes. Our findings suggested that while many of the CCAAT-box gene transcripts are found ubiquitously throughout the plant, in more than half of the cases, the genes are predominantly expressed in flower, embryo and/or silique tissues.

[0125] Roles of CCAAT binding factors in plants. The specific roles of CCAAT-box elements and their binding factors in plants are still poorly understood. CCAAT-box elements have been shown to function in the regulation of gene expression (Rieping and Schoffl (1992); Kehoe et al. (1994); Ito et al. (1995)). Several reports have described the importance of the CCAAT-binding element for regulated gene expression; including the modulation of genes that are responsive to light (Kusnetsov et al. (1999); Carre and Kay (1995); Bezhani et al. (2001)) as well as stress (Rieping and Schoffl (1992)). Specifically, a CCAAT-box motif was shown to be important for the light regulated expression of the CAB2 promoter in Arabidopsis. However, the proteins that bind to the site were not identified (Carre and Kay (1995)).

[0126] Role of LEC1-like proteins. The functions of only two of the Arabidopsis CCAAT-box genes have been genetically determined in the public domain. These genes, LEAFY COTYLEDON 1 (LEC1, G620, SEQ ID NO: 357) and LEAFY COTYLEDON 1-LIKE (L1L, G1821, SEQ ID NO: 358) have critical roles in embryo development and seed maturation (Lotan et al. (1998); Kwong et al. (2003)) and encode proteins of the HAP3 (NF-YB) class. LEC1 has multiple roles in and is critical for normal development during both the early and late phases of embryogenesis (Meinke (1992); Meinke et al. (1994); West et al. (1994); Parcy et al. (1997); Vicient et al. (2000)), Mutant lec1 embryos have cotyledons that exhibit leaf-like characteristics such as trichomes. The gene is required to maintain suspensor cell fate and to specify cotyledon identity in the early morphogenesis phase. Through overexpression studies, LEC1 activity has been shown sufficient to initiate embryo development in vegetative cells (Lotan et al. (1998)). Additionally, lec1 mutant embryos are desiccation intolerant and cannot survive seed dry-down (but can be artificially rescued in the laboratory). This phenotype reflects a role for LEC1 at later stages of seed maturation; the gene initiates and/or maintains the maturation phase, prevents precocious germination, and is required for acquisition of desiccation tolerance during seed maturation. L1L appears to be a paralog of, and partially redundant with LEC1. Like LEC1, L1L is expressed during embryogenesis, and genetic studies have demonstrated that L1L can complement lec1 mutants (Kwong et al. (2003)).

[0127] Putative LEC1 orthologs exist in a wide range of species and based on expression patterns, likely have a comparable function to the Arabidopsis gene. For example, the ortholog of LEC1 has been identified recently in maize. The expression pattern of ZmLEC1 in maize during somatic embryo development is similar to that of LEC1 in Arabidopsis during zygotic embryo development (Zhang et al. (2002)). A comparison of LEC1-like proteins with other proteins of the HAP3 sub-group indicates that the LEC1-like proteins form a distinct phylogenetic clade, and have a number of distinguishing residues, which set them apart from the non-LEC1-like HAP3 proteins (Kwong et al. (2003)). Thus it is likely that the LEC1 like proteins have very distinct functions compared to proteins of the non-LEC1-like HAP3 group.

[0128] HAP3 (NF-YB) proteins have a modular structure and are comprised of three distinct domains: an amino-terminal A domain, a central B domain and a carboxy-terminal C domain. There is very little sequence similarity between HAP3 proteins within the A and C domains suggesting that those regions could provide a degree of functional specificity to each member of the HAP3 subfamily. The B domain is a highly conserved region that specifies DNA binding and subunit association. Lee et al. (2003) performed an elegant series of domain swap experiments between the LEC1 and a non-LEC1 like HAP3 protein (At4 g14540, G485) to demonstrate that the B domain of LEC1 is necessary and sufficient, within the context of the rest of the protein, to confer its activity in embryogenesis. Furthermore, these authors identified a specific defining residue within the B domain (Asp-55) that is required for LEC1 activity and which is sufficient to confer LEC1 function to a non-LEC1 like B domain.

[0129] Discoveries made in earlier genomics programs. G481 is a member of the HAP3 (NF-YB) group of CCAAT-box binding proteins, and falls within the non-LEC-like clade of proteins. G481 is equivalent to AtHAP3a, which was identified by Edwards et al. (1998), as an EST with extensive sequence homology to the yeast HAP3. Northern blot data from five different tissue samples indicated that G481 is primarily expressed in flower and/or silique, and root tissue. RT-PCR studies partially confirmed the published expression data; we detected relatively low levels of G481 expression in all of the tissues tested, with somewhat higher levels of expression being detected in flowers, siliques, and embryos. However, the differential expression of G481 in these relative to other tissues was much less dramatic than that which was seen for G620 (LEC1, 1, SEQ ID NO: 357) and G1821 (L1L, 1, SEQ ID NO: 358), which function specifically in embryo development.

[0130] It was initially discovered that 35S::G481 lines display a hyperosmotic stress tolerance and/or sugar sensing phenotype on media containing high levels of sucrose, after which drought tolerance in a soil-based assay was demonstrated. In addition to G481, there are a further seven other non-LEC1-like proteins which lie on the same branch of the phylogenetic tree (FIG. 2), and represent the phylogenetically related sequences G1364, G2345, G482, G485, G1781, G1248 and G486 (polypeptide SEQ ID NOs: 14, 22, 28, 18, 56, 360, and 356, respectively). Two other HAP3 proteins, G484 (polypeptide SEQ ID NO: 354) and G2631 (polypeptide SEQ ID NO: 362) appear to be rather more distantly related. G1364 and G2345 are the Arabidopsis proteins most closely related to G481; however, neither of these genes has been found to confer hyperosmotic stress tolerance.

[0131] G482 (polypeptide SEQ ID NO: 28) is slightly further diverged from G481 than G2345 and G1364 (FIG. 2), but has an apparently similar function given that 35S::G482 lines analyzed during our initial genomics screens displayed an hyperosmotic stress response phenotype similar to 35S::G481. Another HAP3 gene, G485 (SEQ ID NO: 17 and 18), is most closely related to G482. G485 was not implicated in regulation of stress responses in our initial screens, but KO.G485 and 35S::G485 lines exhibited opposite flowering time phenotypes, with the mutant flowering late, and the overexpression lines flowering early. Thus, G485 functions as an activator of the floral transition. Interestingly, two of the other non-LEC1-like genes, G1781 (SEQ ID NO: 55) and G1248 (SEQ ID NO: 359), were also found to accelerate flowering when overexpressed, during our genomics program. However, overexpression lines for neither of those genes were found to show alterations in stress tolerance. G486 was also noted to produce effects on flowering time, but these were inconclusive and rather variable between different lines.

[0132] In addition to HAP3 (NF-YB) genes, a number of HAP5 (NF-YC) genes were found to influence abiotic stress responses during our initial genomics program. G489 (SEQ ID NO: 45), G1836 (SEQ ID NO: 47), and G1820 (SEQ ID NO: 43) are all HAP5-like proteins that generated hyperosmotic stress tolerance phenotypes when overexpressed. Thus, we surmised that these proteins might potentially be members of the same heteromeric complex as G481 or one or more of the other HAP3 proteins.

[0133] Potential mode of action of G481. The enhanced tolerance of 35S::G481 lines to sucrose seen in our genomics screens suggests that G481 could influence sugar sensing and hormone signaling. Several sugar sensing mutants have turned out to be allelic to ABA and ethylene mutants. On the other hand, the sucrose treatment (9.5% w/v) could have represented an hyperosmotic stress; thus, one might also interpret the results as indicating that G481 confers tolerance to hyperosmotic stress. LEC1 (G620, polypeptide SEQ ID NO: 358), which is required for desiccation tolerance during seed maturation, is also ABA and drought inducible. This information, combined with the fact that CCAAT genes are disproportionately responsive to hyperosmotic stress suggests that the family could control pathways involved in both ABA response and desiccation tolerance. In particular, given their phylogenetic divergence, it is possible that LEC1-like proteins have evolved to confer desiccation tolerance specifically within the embryo, whereas other non-LEC1-like HAP3 proteins confer tolerance in non-embryonic tissues.

[0134] A role in sugar sensing also supports the possibility that, as in yeast, CCAAT-box factors from plants play a general role in the regulation of energy metabolism. Indeed, the fact that plants exhibit two modes of energy metabolism (in the form of photosynthesis and respiration) could account for the expansion of the family in the plant kingdom. Specifically, a mechanism that is currently being evaluated is that G481-related proteins regulate starch/sugar metabolism, and as such, influence both the osmotic balance of cells as well as the supply of photosynthate to sink areas. Such hypotheses can account for a number of the off-types, such as reduced yield (under well-watered conditions) and delayed senescence, seen in corn and soy field tests of G481 (and related genes) overexpression lines. The prospective involvement of CCAAT box factors in chloroplast development and retrograde signaling also suggests a further means by which G481-related genes could confer stress tolerance. The genes might act to maintain chloroplast function under unfavorable conditions. In fact, any effects on expression of chloroplast components could well be indirectly related to the putative effects on carbohydrate metabolism.

### Background Information for G634, the G634 Clade, and Related Sequences

[0135] G634 (SEQ ID NO: 49) encodes a TH family protein (SEQ ID NO: 50). This gene was initially identified from public partial cDNAs sequences for GTL1 and GTL2 which are splice variants of the same gene (Smalle et al (1998)). The published expression pattern of GTL1 shows that G634 is highly expressed in siliques and not expressed in leaves, stems, flowers or roots.

### Background Information for G1073, the G1073 Clade, and Related Sequences

[0136] G1073 (SEQ ID NO: 114) is a member of the At-hook family of transcription factors. We have now designated this locus as HERCULES 1 (HRC1), in recognition of the increased organ size seen in 35S::G1073 lines. A major goal of the current program is to define the mechanisms by which G1073 regulates organ growth and to understand how these are related to the ability of this factor to regulate stress tolerance responses. This will allow us to optimize the gene for use in particular target species where increased stress tolerance is desired without any associated effects on growth and development.

[0137] Structural features of the G1073 protein. G1073 is a 299 residue protein that contains a single typical AT-hook DNA-binding motif (RRPRGRPAG) at amino acids 63 to 71. A highly conserved 129 AA domain, with unknown function, can be identified in the single AT-hook domain subgroup. Following this region, a potential acidic domain spans from position 200 to 219. Additionally, analysis of the protein using PROSITE reveals three potential protein kinase C phosphorylation sites at Ser61, Thr112 and Thr131, and three potential casein kinase II phosphorylation sites at Ser35, Ser99 and Ser276. Additional structural features of G1073 include 1) a short glutamine-rich stretch in the C-terminal region distal to the conserved acidic domain, and 2) possible PEST sequences in the same C-terminal region.

[0138] The G1073 protein is apparently shorter at the N-terminus compared to many of the related At-hook proteins that we had identified. The product of the full-length cDNA for G1073 (SEQ ID NO: 113, polypeptide product SEQ ID NO: 114 and shown in FIGS. 10A-10H) has an additional 29 amino acids at the N-terminus relative to our original clone P448, SEQ ID NO: 609, was the original G1073 clone that was overexpressed during earlier genomics screens). We have now built a new phylogenetic tree for G1073 versus the related proteins, but the relationships on this new tree are not substantially changed relative to phylogeny presented in our previous studies.

[0139] With regard to G1073 and related sequences, within the G1073 clade of transcription factor polypeptides the AT-hook domain generally comprises the consensus sequence:

RPRGRPXG,
or
Arg-Pro-Arg-Gly-Arg-Pro-Xaa-Gly

[0140] where X or Xaa can be any of a number of amino acid residues; in the examples that have thus far been shown to confer abiotic stress tolerance, Xaa has been shown to represent an alanine, leucine, proline, or serine residue.

[0141] Also within the G1073 clade, a second conserved domain exists that generally comprises the consensus sequence:

Gly-Xaa-Phe-Xaa-Ile-Leu-Ser-(Xaa)₂-Gly-(Xaa)₂-Leu-
Pro-(Xaa)₃₋₄-Pro-(Xaa)₅-Leu-(Xaa)₂-Tyr/Phe-(Xaa)₂-
Gly-(Xaa)₂-Gly-Gln.

[0142] A smaller subsequence of interest in the G1073 clade sequences comprises:

Pro-(Xaa)₅-Leu-(Xaa)₂-Tyr;
or
Pro-(Xaa)₅-Leu-(Xaa)₂-Phe;

[0143] The tenth position of these latter two sequences is an aromatic residue, specifically tyrosine or phenylalanine, in the G1073 clade sequences that have thus far been examined.

[0144] Thus, the transcription factors of the invention each possess an AT-hook domain and a second conserved domain, and include paralogs and orthologs of G1073 found by BLAST analysis, as described below. The AT-hook domains of G1073 and related sequences examined thus far are at least 56% identical to the At-Hook domains of G1073, and the second conserved domains of these related sequences are at least 44% identical to the second conserved domain found in G1073. These transcription factors rely on the binding specificity of their AT-hook domains; many have been shown to have similar or identical functions in plants by increasing the size and biomass of a plant.

[0145] Role of At-hook proteins. The At-hook is a short, highly-conserved, DNA binding protein motif that comprises a conserved nine amino acid peptide (KRPRGRPKK) and is capable of binding to the minor groove of DNA (Reeves and Nissen (1990)). At the center of this AT-hook motif is a short, strongly conserved tripeptide (GRP) comprised of glycine-arginine-proline (Aravind and Landsman (1998)). At-hook motifs were first recognized in the non-histone chromosomal protein HMG-I(Y) but have since been found in other DNA binding proteins from a wide range of organisms. In general, it appears that the AT-hook motif is an auxiliary protein motif cooperating with other DNA-binding activities and facilitating changes in the structure of the chromatin (Aravind and Landsman (1998)). The AT-hook motif can be present in a variable number of copies (1-15) in a given AT-hook protein. For example, the mammalian HMG-I(Y) proteins have three copies of this motif.

[0146] In higher organisms, genomic DNA is assembled into multilevel complexes by a range of DNA-binding proteins, including the well-known histones and non-histone proteins such as the high mobility group (HMG) proteins (Bianchi and Beltrame (2000)). HMG proteins are classified into different groups based on their DNA-binding motifs, and it is the proteins from one such group, the HMG-I(Y) subgroup, which are all characterized by the presence of copies of the At-hook. (Note that the HMG-I(Y) subgroup was recently renamed as HMGA; see Table 1 of report in Bianchi and Beltrame (2000), for information on nomenclature).

[0147] HMGA class proteins containing AT-hook domains have also been identified in a variety of plant species, including rice, pea and Arabidopsis (Meijer et al. (1996); and Gupta et al (1997a)). Depending on the species, plant genomes contain either one or two genes that encode HMGA proteins. In contrast to the mammalian HMGA proteins, though, the plant HMGA proteins usually possess four, rather than three repeats of the At-hook (see reviews by Grasser (1995); Grasser (2003)). Typically, plant HMGA genes are expressed ubiquitously, but the level of expression appears to be correlated with the proliferative state of the cells. For example, the rice HMGA genes are predominantly expressed in young and meristematic tissues and may affect the expression of genes that determine the differentiation status of cells. The pea HMGA gene is expressed in all organs including roots, stems, leaves, flowers, tendrils and developing seeds (Gupta et al (1997a)). Northern blot analysis revealed that an Arabidopsis HMGA gene was expressed in all organs with the highest expression in flowers and developing siliques (Gupta et al. (1997b)).

[0148] In plants, however, very little is known about the specific roles of HMGA class proteins. Nonetheless, there is some evidence that they might have functions in regulation of light responses. For example, PF1, a protein with AT-hook DNA-binding motifs from oat and was shown to binds to the PE1 region in the oat phytochrome A3 gene promoter. This factor and may be involved in positive regulation of PHYA3 gene expression (Nieto-Sotelo and Quail (1994)). The same group later demonstrated that PF1 from pea interacts with the PHYA gene promoter and stimulates binding of the transcriptional activator GT-2 (Martinez-Garcia and Quail (1999)). Another example concerns expression of a maize AT-hook protein in yeast cells, which produced better growth on a medium containing high nickel concentrations. Such an effect suggests that the protein might influence chromatin structure, and thereby restrict nickel ion accessibility to DNA (Forzani et al. (2001)).

[0149] During our genomics program we identified 34 Arabidopsis genes that code for proteins with AT-hook DNA-binding motifs. Of these proteins, 22 have a single AT-hook DNA-binding motif; 8 have two AT-hook DNA-binding motifs; three (G280, G1367 and G2787, SEQ ID NOs: 364, 366 and 370, respectively) have four AT-hook DNA-binding motifs. The public data regarding the function of these factors are sparse. This is particularly true of those proteins containing single AT-hook motifs such as G1073. It is worth noting that these single At-hook factors may function differently to those with multiple AT-hook motifs, such as HMGA proteins. However, an activation-tagged mutant for an Arabidopsis AT-hook gene named ESCAROLA (corresponding to G1067) has been identified by Weigel et al. (Weigel et al. (2000)). In this G1067 activation line, delayed flowering was observed, and leaves were wavy, dark green, larger, and rounder than in wild type. Moreover, both leaf petioles and stem internodes were shorter in this line than wild type. Such complex phenotypes suggest that the gene influences a wide range of developmental processes.

[0150] Recently, one of the single At-hook class proteins has been shown to have a structural role in the nucleus. At-hook motif nuclear localized protein (AHL1), corresponding to G1944, SEQ ID NO: 3687, was found in the nucleoplasm and was localized to the chromosome surface during mitosis (Fujimoto et al. (2004)). The At-hook of this factor was shown to be necessary for binding of the matrix attachment region (MAR). Such a result suggests that AHL1 (G1944) has a role in regulating chromosome dynamics, or protection of the chromosomes during cell division. G1944 is relatively distantly related to G1073 and lies outside of the G1073 clade. However, the result is of interest as it evidences the fact the single At-hook class proteins as well as the HMGA class (which have multiple At-hooks) can have structural roles in organizing chromosomes.

[0151] Overexpression of G1073 in Arabidopsis. We established that overexpression of G1073 leads to increased vegetative biomass and seed yield compared to control plants. As a result of these phenotypes we assigned the gene name HERCULES1 (HRC1) to G1073. Drought tolerance was observed in 35S::G1073 transgenic lines. More recently we observed hyperosmotic stress-tolerance phenotypes, such as tolerance to high salt and high sucrose concentrations, in plate assays performed on 35S::G1073 plants.

[0152] 35S::G1073 Arabidopsis lines display enlarged organs, due to increased cell size and number. We also conducted some preliminary analyses into the basis of the enhanced biomass of 35S::G1073 Arabidopsis lines. We found that the increased mass of 35S::G1073 transgenic plants could be attributed to enlargement of multiple organ types including leaves, stems, roots and floral organs. Petal size in the 35S::G1073 lines was increased by 40-50% compared to wild type controls. Petal epidermal cells in those same lines were approximately 25-30% larger than those of the control plants. Furthermore, we found 15-20% more epidermal cells per petal, compared to wild type. Thus, at least in petals, the increase in size was associated with an increase in cell size as well as in cell number. Additionally, images from the stem cross-sections of 35S::G1073 plants revealed that cortical cells were large and that vascular bundles contained more cells in the phloem and xylem relative to wild type.

[0153] To quantify the 35S::G1073 phenotype we examined the fresh and dry weight of the plants (Table 1). 35S::G1073 lines showed an increase of at least 60% in biomass. More importantly, the 35S::G1073 lines showed an increase of at least 70% in seed yield. This increased seed production appears to be associated with an increased number of siliques per plant, rather than seeds per silique or increased size.

TABLE 1
Comparison of wild type and G1073 overexpressor
biomass and seed yield production

| Line | Fresh weight (g) | Dry weight (g) | Seed (g) |
|---|---|---|---|
| WT | 3.43 ± 0.70 | 0.73 ± 0.20 | 0.17 ± 0.07 |
| 35S::G1073-3 | 5.74 ± 1.74 | 1.17 ± 0.30 | 0.31 ± 0.08 |
| 35S::G1073-4 | 6.54 ± 2.19 | 1.38 ± 0.44 | 0.35 ± 0.12 |

Average value (±standard error) from 20 plants harvested at near end of life cycles (70 days after planting)

[0154] Genetic regulation of organ size in plants. To use G1073 in the engineering of drought tolerance, without incurring increased organ size phenotypes, an understanding of the genetic control features of organ size is necessary. Organ size is under genetic control in both animals and plants, although the genetic mechanisms of control are likely quite distinct between these kingdoms. Current understanding of organ size control in plants is limited, but what is known has been summarized by Hu et al. (2003); Krizek (1999); Mizukama and Fischer (2000); Lincoln et al. (1990); Zhong and Ye (2001); Ecker (1995); Nath et al. (2003); and Palatnik et al. (2003). Organ size is regulated by both external and internal factors, with a general understanding that these factors contribute to the maintenance of meristematic competence. The “organ size control checkpoint”, which is thought to regulate meristematic competence, is the determining feature in the control of organ size (Mizukami (2001)). There are a few genes that have been shown previously to contribute to organ size control, including AINTEGUMENTA (Krizek (1999); Mizukami and Fischer (2000)), AXR1 (Lincoln et al. (1990)), and ARGOS (Hu et al. (2003)). Not surprisingly, these genes are involved with hormone response pathways, particularly auxin response pathways. For example, ARGOS was identified initially through microarray experiments as being highly up-regulated by auxin. ARGOS was subsequently shown to increase organ size when overexpressed in Arabidopsis (Hu et al. (2003)). Additionally, a number of publications have implicated proteins from the TCP family in the control of organ size and shape in Arabidopsis (Cubas et al. (1999); Nath et al. (2003); Palatnik et al. (2003); Crawford et al. (2004)).

[0155] We have begun to examine how the pathways through which G1073 acts related to the known pathways of organ growth regulation. In particular, we are investigating the idea that G1073 regulates a pathway that regulates organ growth in response to environmentally derived stress signals.

### Background Information for G682, the G682 Clade, and Related Sequences

[0156] We identified G682, SEQ ID NO: 60, as a transcription factor from the Arabidopsis BAC AF007269 based on sequence similarity to other members of the MYB-related family within the conserved domain. To date, no functional data are available for this gene in the literature. The gene corresponds to At4G01060, annotated by the Arabidopsis Genome initiative. G682 is member of a clade of related proteins that range in size from 75 to 112 amino acids. These proteins contain a single MYB repeat, which is not uncommon for plant MYB transcription factors. Information on gene function has been published for four of the genes in this clade, CAPRICE (CPC/G225), TRIPTYCHON (TRY/G1816), ENHANCER of TRY and CPC 1 (ETC1/G2718) and ENHANCER of TRY and CPC 2 (ETC2/G226). Published information on gene function is not available for G682, or for G3930 (SEQ ID NO: 411) which was only recently identified. The G3930 locus has not been recognized in the public genome annotation. Members of the G682 clade were found to promote epidermal cell type alterations when overexpressed in Arabidopsis. These changes include both increased numbers of root hairs compared to wild type plants, as well as a reduction in trichome number. In addition, overexpression lines for the first five members of the clade showed a reduction in anthocyanin accumulation in response to stress, and enhanced tolerance to hyperosmotic stress. In the case of 35S::G682 transgenic lines, an enhanced tolerance to high heat conditions was also observed. Given the phenotypic responses for G682 and its clade members, all members of the clade were included in our studies. The analysis of G225 (CPC), however, has been limited. Table 2 summarizes the functional genomics program data on G682 and its clade members.

TABLE 2
G682-clade traits

| | CPC | G226 (SEQ | G682 (SEQ | TRY (G1816, | G2718 (SEQ |
|---|---|---|---|---|---|
| | (G225) | ID NO: 62) | ID NO: 60) | SEQ ID NO: 76) | ID NO: 64) |
| Reduction in Trichome # | X | X | X | X | X |
| Increased Root Hair # | X | X | X | X | X |
| N Tolerance | X | X | | X | X |
| Heat Tolerance | X | | X | | |
| Salt Tolerance | | X | | | |
| Sugar response | | | | X | |

[0157] MYB (Myeloblastosis) transcription factors. MYB proteins are functionally diverse transcription factors found in both plants and animals. They share a signature DNA-binding domain of approximately 50 amino acids that contains a series of highly conserved residues with a characteristic spacing (Graf (1992)). Critical in the formation of the tertiary structure of the conserved Myb motif is a series of consistently spaced tryptophan residues (Frampton et al. (1991)). Animal Mybs contain three repeats of the Myb domain: R1, R2, and R3. Plant Mybs usually contain two imperfect Myb repeats near their amino termini (R2 and R3), although there is a small subgroup of three repeat (R1R2R3) mybs similar to those found in animals, numbering approximately eight in the Arabidopsis genome. A subset of plant Myb-related proteins contain only one repeat (Martin and Paz-Ares (1997)). Each Myb repeat has the potential to form three alpha-helical segments, resembling a helix-turn-helix structure (Frampton et al. (1991)). Although plant Myb proteins share a homologous Myb domain, differences in the overall context of their Myb domain and in the specific residues that contact the DNA produce distinct DNA-binding specificities in different members of the family. Once bound, MYB proteins function to facilitate transcriptional activation or repression, and this sometimes involves interaction with a protein partner (Goff et al. (1992)). We divide MYB transcription factors into two families; the MYB (R1)R2R3 family which contains transcription factors that typically have two imperfect MYB repeats, and the MYB-related family which contains transcription factors that contain a single MYB-DNA binding motif.

[0158] The MYB-related family (Single-repeat MYB transcription factors). There are approximately 50 members of this family in Arabidopsis. The MYB-related DNA-binding domain contains approximately 50 amino acids with a series of highly conserved residues arranged with a characteristic spacing. The single-repeat MYB proteins do not contain a typical transcriptional activation domain and this suggests that they may function by interfering with the formation or activity of transcription factors or transcription factor complexes (Wada et al. (1997); Schellmann et al. (2002)). In addition to the G682 clade, two well characterized transcription factors, CIRCADIAN CLOCK ASSOCIATED1 (CCA1/G214/SEQ ID NO: 345) and LATE ELONGATED HYPOCOTYL (LHY/G680/SEQ ID NO: 343) represents additional well-characterized MYB-related proteins that contain single MYB repeats (Wang et al. (1997); Schaffer et al. (1998)).

[0159] Epidermal cell-type specification. Root hair formation and trichome formation are two processes that involve the G682 clade members. Epidermal cell fate specification in the Arabidopsis root and shoot involves similar sets of transcription factors that presumably function in mechanistically similar ways (Larkin et al. (2003)). The initial step in cell-type specification in both cases is evidently controlled by antagonistic interactions between G682-clade members and other sets of genes (Table 3). In the case of the shoot epidermis, G682 clade members repress trichome specification, and in the case of the root epidermis G682 clade members promote root-hair specification. Table 4 compiles the list of genes that have been implicated in root hair and trichome cell specification through genetic and biochemical characterization where both loss-of-function and gain-of-function phenotypes have been analyzed. The specific roles of these genes are discussed in the following sections.

TABLE 3
Antagonistic interactions in epidermal cell-type specification.

| | Root Hair Fate | Trichome Fate |
|---|---|---|
| Promotes | CPC/TRY (G682 clade) | GL1 (R2R3 MYB), TTG |
| | | (WD-repeat), GL3 (bHLH) |
| Represses | WER(R2R3 MYB), TTG | CPC/TRY (G682 clade) |
| | (WD-repeat), GL3 (bHLH) | |

TABLE 4
Transcription factors involved in epidermal cell fate

| Gene | GL3 | EGL3 | GL1 | WER | GL2 | TTG1 | CPC | TRY | ETC1 | ETC2 |
|---|---|---|---|---|---|---|---|---|---|---|
| Name | | | | | | | | | | |
| GID | G585 | G581 | G212 | G676 | G388 | n/a | G225 | G1816 | G2718 | G226 |
| SEQ ID | 340 | 338 | 348 | 350 | 352 | | | 76 | 64 | 62 |
| NO. | | | | | | | | | | |
| Gene | bHLH/ | bHLH/ | MYB- | MYB- | HD | n/a | MYB- | MYB- | MYB- | MYB |
| Family | MYC | MYC | (R1) | (R1) | | | related | related | related | related |
| | | | R2R3 | R2R3 | | | | | | |
| Paralogs | G586 | | G247, | G212, | none | n/a | G226, | G225, | G225, | G225, |
| | | | G676 | G247 | | | G682, | G226, | G226, | G682, |
| | | | | | | | G1816, | G682, | G682, | G1816, |
| | | | | | | | G2718, | G2718, | G1816, | G2718, |
| | | | | | | | G3930 | G3930 | G3930 | G3930 |
| Loss-of- | Slight root | Slight root | Glabrous | All cell | Ectopic | All cell | No root | wild-type | wild-type | wild-type |
| Function | hair | hair | | files are | hairs, | files are | hairs, | roots, | roots and | roots, |
| | increase, | increase, | | hairs | glabrous | hairs | ectopic | ectopic tri- | shoots | ectopic |
| | reduction | reduction | | | | glabrous | tri- | chomes | | tri- |
| | in | in | | | | | chomes | | | chomes |
| | trichome | trichome | | | | | | | | |
| | number | number | | | | | | | | |
| Gain-of- | Ectopic | Ectopic | Ectopic | Wild- | Wild- | Wild-type | Ectopic | Ectopic | Ectopic | Ectopic |
| Function | trichomes | tri-chomes | tri- | type | type | | root hairs, | root hairs, | root hairs, | root hairs, |
| | | | chomes | | | | glabrous | glabrous | glabrous | glabrous |
| Site of | Leaf and | Leaf, | Leaf | Root | Leaf Epidermis, | Leaf Epidermis, | Leaf | Leaf Epidermis | Leaf | Leaf |
| Activity | root | Root | epidermis | Epidermis | Root Epidermis | Root | Epidermis | and | Epidermis | Epidermis |
| | epidermis | Epidermis, | | | and Seed | Epidermis | and | Root | and | and |
| | | Seed Coat | | | Coat | and | Root | Epidermis | Root | Root |
| | | | | | | Seed Coat | Epidermis | | Epidermis | Epidermis |
| Citations | 1, 2 | 2 | 3 | 4 | 3, 5 | 6 | 7 | 8 | 9 | 10 |

References:
(1) Payne et al. (2000);
(2) Zhang et al. (2003);
(3) Di Cristina et al. (1996);
(4) Lee and Schiefelbein (1999);
(5) Masucci J. et al. (1996);
(6) Galway et al. (1994);
(7) Wada et al. (1997);
(8) Schellmann et al. (2002);
(9) Kirik et al. (2004a);
(10) Kirik et al. (2004b)

[0160] Leaf epidermis cell-type specification: GLABRA2 (GL2/G388) encodes a homeodomain-leucine zipper protein that promotes non-hair cell fate in roots and trichome fate in the shoot; and GL2 expression represents a critical regulatory step in the process of epidermal cell-type differentiation in both the root and shoot. In leaf epidermal tissue, the default program is the formation of a trichome cell which is promoted by GL2 expression. GL2 is induced by a proposed “activator complex” that is composed of GL1 (G212), an R2R3MYB protein, TTG1 a WD-40 repeat containing protein, and GL3 (G585) a bHLH transcription factor. The formation of this complex is supported by genetic data as well as by biochemical data (Larkin et al. (2003)). Yeast 2-hybrid data shows that GL3 interacts directly with both TTG1 and GL1 (Payne et al. (2000)). Non-trichome cell fate, on the other hand, is specified in neighboring cells through the combined activity of TRY (G1816), CPC (G225), ETC1 (G2718) and ETC2 (G226), which are all members of the G682 clade. In this report, we determined the expression pattern of G682 throughout development, to compare with expression patterns from other clade members. Since 35S::G682 lines are glabrous, G682 is also likely to participate in the suppression of trichome fate in the epidermis of wild-type leaves. The precise mechanism by which each clade member acts is, however, unknown. Later in organ development, TRY (G1816), CPC (G225), ETC1 (G2718) and ETC2 (G226) are expressed at relatively high levels in trichomes (Schellmann et al. (2002); Kirik et al. (2004a); Kirik et al. (2004b)), whereas there is no published expression data on G682.

[0161] One intriguing result related to the expression of both CPC and TRY is that they are not expressed preferentially in the cells adjacent to the trichomes where they act to suppress trichome fate. In fact, CPC and TRY transcription is induced by GL1 in cells that become trichomes. Schellmann et al. (2002), have proposed a “lateral inhibition” model to explain this paradox. Lateral inhibition is a process whereby a cell that is taking a certain fate prevents its neighbors from taking that same fate. The mechanism of lateral inhibition involves diffusible activators and repressors, and the activator complex stimulates its own expression as well as that of the repressor. The repressor then moves across cell boundaries to suppress the activator complex found in neighboring cells.

[0162] GL1, TTG1 and GL3 function in a regulatory feedback loop, enhancing their own expression. A complex composed of those three proteins activates GL2 which promotes trichome cell fate. The GL1/TTG/GL3 complex also serves to activate the repressors CPC and TRY which suppress their expression, and trichome formation, in neighboring cells. The repressors (CPC/TRY) are proposed to move across the cell boundary resulting in the suppression of the activator complex in neighboring cells. In other words, in cells where the proteins are initially being produced, the scales are still tipped in the direction of the activator and in the neighboring cells the scales are tipped in the direction of the repressor. It is worth noting that a CPC:GFP fusion protein has been shown to move from cell to cell in the epidermis of the root (Wada et. al. (2002)), presumably through plasmodesmata.

[0163] Root epidermis cell-type specification: In the root epidermis the “activator complex” and GL2 promote non-hair cell fate, and in neighboring cells CPC and TRY (as well as ETC1 and ETC2) promote root hair fate. Involvement of CPC in a lateral inhibition model in root hair cell specification was supported by a series of genetic experiments described recently by Lee and Schiefelbein (2002). The proposed “activator” that is important for the specification of a non-root hair cell fate is thought to be composed of WER (G676; a MYB-related transcription factor and paralog to GL1), TTG and GL3. Recently, Zhang et al. (Zhang et al. (2003)) published results confirming the function of GL3 in root epidermal specification, and they identified a second bHLH transcription factor EGL3 (G581) that also presumably can function in the “activator complex”. EGL3 (G581) overexpressors showed increased tolerance to low nitrogen conditions in our earlier Arabidopsis functional genomics program G581, SEQ ID NO: 338, also had a seed anthocyanin phenotype when overexpressed. The repressor proteins in this model are, again, CPC and TRY (along with ETC1 and ETC2; Kirik et al. (2004a) and Kirik et al. (2004b)). Consistent with this model, Lee and Schiefelbein (2002) have shown that CPC inhibits the expression of WER, GL2 and itself. They have also shown that WER activates GL2 and CPC. As mentioned above CPC:GFP fusion proteins move from cell to cell in the root epidermis (Wada et al. (2002)), and it is known that specification begins prior to significant cell expansion (Costa and Dolan (2003)) at a time when the root epidermis is symplastically contiguous (Duckett et al. (1994)).

[0164] One striking feature of root hair specification is that the root hairs are always placed over the end-wall of the underlying cortical cells. This highly consistent placement of trichomes strongly suggests that the epidermal cells are responding to cues from below. Here we suggest two hypotheses for how signals from beneath the epidermis pre-pattern it. In the first hypothesis, an apoplastic signal moves between the cortex cells and promotes a bias towards CPC/TRY in the epidermal cells that contact the wall. Ethylene is one candidate for such an apoplastic signal, and ethylene is known to affect root hair differentiation in Arabidopsis (Taminoto et al. (1995); Di Cristina et al. (1996)).

[0165] In the second hypothesis, a polarity in the cortical cells with regard to cortex-to-epidermis signaling could pre-pattern the epidermis. It is worth noting that CPC is expressed in all cell layers of the root in the region of specification (Wada et al. (2002); Costa and Dolan (2003); thus it is possible that CPC/TRY moves into theepidermis from the cortical cell layer. The preferential transport of CPC/TRY near the side-wall of the cortical cells could lead to a CPC/TRY bias in the cells that contact two cortical cells (i.e., the cells that are specified as hair cells). Alternatively, the differential movement of unknown symplastic signals could also act to pre-pattern the epidermis.

[0166] A receptor-like kinase, SCRAMBLED (SCM, which disrupts the precise striped patterning of epidermal cell files in Arabidopsis, has recently been identified (Kwak et al. (2005)). In scm mutants, epidermal patterning genes such as WER and GL2 are no longer expressed in long cell files, but instead are expressed in a patchy manner. The specification of root hair and non-hair cells also occurs in a patchy manner. Although SCM is evidently required for proper cell-file patterning, it is unclear precisely how it fits into specification processes. The expression of this gene is not specific to either hair cells, or non-hair cells, and thus SCM is unlikely to be sufficient for establishing cell-type identity. At present, no ligand for SCM has been identified. Curiously, the expression of SCM is relatively low in the epidermis, and much higher in the cell-layers underlying it (Kwak et al. (2005)). The significance, if any, of the high levels of expression in inner cell layers is not known.

[0167] Discoveries made in earlier genomics programs. The difference in the phenotypic responses of the G682-clade overexpression lines (Table 2), along with the differences in the CPC (G225) and TRY (G1816) mutant phenotypes (Schellmann et al. (2002)), suggest that each of the 5 genes in the clade have distinct but overlapping functions in the plant. In the case of 35S::G682 transgenic lines, an enhanced tolerance to high heat conditions was observed. Heat can cause osmotic stress, and it is therefore reasonable that these transgenic lines were also more tolerant to drought stress in a soil-based assay. Another common feature for 4 of the members of this clade is that they enhance performance under nitrogen-limiting conditions. 35S::G682 plants were not identified as having enhanced performance under nitrogen-limiting conditions in the genomics program. We have evaluated, in this report, performance of G682 and its clade members with respect to various assays suggesting altered nitrogen utilization.

[0168] All of the genes in the Arabidopsis G682 clade reduced trichomes and increased root hairs when constitutively overexpressed (Table 2). It is unknown, however, whether the drought-tolerance phenotype in these lines is related to the increase in root hairs on the root epidermis. Increasing root hair density may increase in absorptive surface area and increase in nitrate transporters that are normally found there. Alternatively, the wer, ttg1 and gl2 mutations, all of which increase root hair frequency, and have also been shown to cause ectopic stomate formation on the epidermis of hypocotyls. Thus, it is possible that the G682 clade could be involved in the development, or regulation, of stomates (Hung et al. (1998); Berger et al. (1998); Lee and Schiefelbein (1999)). The CPC (G225) and TRY (G1816) proteins have not been reported to alter hypocotyl epidermal cell fate, however; the role of G682 in stomatal guard cell density is evaluated in this report. Alterations in stomate function could also alter plant water status, and guard-cell apertures and light response remain to be examined in G682-clade overexpression lines.

[0169] Interestingly, our data also suggest that G1816 (TRY) overexpression lines have a glucose sugar sensing phenotype. Several sugar sensing mutants have turned out to be allelic to ABA and ethylene mutants. This potentially implicates G1816 in hormone signaling and in an interaction of hormone signaling, stress responses and sugars.

[0170] Protein structure and properties. G682 and its paralogs and orthologs are composed (almost entirely) of a single MYB-repeat DNA binding domain that is highly conserved across plant species. An alignment of the G682-like proteins from Arabidopsis, soybean, rice and corn that are being analyzed is shown in FIGS. 5A and 5B.

[0171] Because the G682 clade members are short proteins that are comprised almost exclusively of a DNA binding motif, it is likely that they function as repressors. This is consistent with in expression analyses indicating that CPC represses its own transcription as well as that of WER and GL2 (Wada et al. (2002); Lee and Schiefelbein (2002)). Repression may occur at the level of DNA binding through competition with other factors at target promoters, although repression via protein-protein interactions cannot be excluded.

[0172] We first identified G867, SEQ ID NO: 88, as a transcription factor encoded by public EST sequence (GenBank accession N37218). Kagaya et al. (Kagaya et al. (1999)) later assigned the gene the name Related to ABI3/VP1 1 (RAV1) based on the presence of a B3 domain in the C-terminal portion of the encoded protein. In addition to the B3 domain, G867 contains a second DNA binding region, an AP2 domain, at its N terminus. There are a total of six RAV related proteins with this type of structural organization in the Arabidopsis genome: G867 (AT1G13260, RAV1), G9 (AT1G68840, which has been referenced as both RAP2.8, Okamuro et al. (1997), and as RAV2, Kagaya et al. (1999)), G1930, SEQ ID NO: 92 (AT3G25730), G993, SEQ ID NO: 90 (AT1G25560), G2687, SEQ ID NO: 380 (AT1G50680), and G2690, SEQ ID NO: 382 (AT1G51120). Recently, G867 was identified by microarray as one of 53 genes down-regulated by brassinosteroids in a det2 (BR-deficient) cell culture. This down-regulation was not dependent on BRI1, and mild down-regulation of G867 also occurred in response to cytokinins (Hu et al. (2004). These authors also showed that overexpression of G867 reduces both root and leaf growth, and causes a delay in flowering. A G867 knockout displays early flowering time, but no other obvious effect. A detailed genetic characterization has not been published for any of the other related genes.

[0173] On the basis of the AP2 domain, the six RAV-like proteins were categorized as part of the AP2 family. However, the B3 domain is characteristic of proteins related to ABI3/VP1 (Suzuki et al. (1997)).

[0174] AP2 domain transcription factors. The RAV-like proteins form a small subgroup within the AP2/ERF family; this large transcription factor gene family includes 145 transcription factors (Weigel (1995); Okamuro et al. (1997); Riechmann and Meyerowitz (1998); Riechmann et al. (2000a). Based on the results of the our genomics screens it is clear that this family of proteins affect the regulation of a wide range of morphological and physiological processes, including the acquisition of stress tolerance. The AP2 family can be further divided into three subfamilies:

[0175] The APETALA2 class is related to the APETALA2 protein itself (Jofuku et al. (1994)), characterized by the presence of two AP2 DNA binding domains, and contains 14 genes.

[0176] The AP2/ERF is the largest subfamily, and includes 125 genes, many of which are involved in abiotic (DREB subgroup) and biotic (ERF subgroup) stress responses (Ohme-Takagi and Shinshi (1995); Zhou et al. (1995b) Stockinger et al. (1997); Jaglo-Ottosen et al. (1998); Finkelstein et al. (1998)).

[0177] The 6 genes from the RAV subgroup, all of which have a B3 DNA binding domain in addition to the AP2 DNA binding domain.

[0178] B3 domain transcription factors. ABI3/VP1 related genes have been generally implicated in seed maturation processes. The ABSCISIC ACID INSENSITIVE (ABI3, G621, SEQ ID NO: 376) protein and its maize ortholog VIVIPAROUS1 (VP1) regulate seed development and dormancy in response to ABA (McCarty et al. (1991); Giraudat et al. (1992)). ABI3 (G621, SEQ ID NO: 376) and VP1 play an important role in the acquisition of desiccation tolerance in late embryogenesis. This process is related to dehydration tolerance as evidenced by the protective function of late embryogenesis abundant (LEA) genes such as HVA1 (Xu et al. (1996), Sivamani et al. (2000)). Mutants for Arabidopsis ABI3 (Ooms et al. (1993)) and the maize ortholog VP1 (Carson et al. (1997), and references therein) show severe defects in the attainment of seed desiccation tolerance. ABI3 activity is normally restricted to the seeds. However, overexpression of ABI3 from a 35S promoter was found to increase ABA levels, induce several ABA/cold/drought-responsive genes such as RAB18 and RD29A and increased freezing tolerance in Arabidopsis (Tamminen et al. (2001)). These data illustrate the relatedness of the processes of seed desiccation and dehydration tolerance and demonstrates that the seed-specific ABI3 transcription factor does not require additional seed-specification proteins to function vegetative tissues. Recently, a tight coupling has been demonstrated between ABA signaling and ABI3/VP1 function; Suzuki et al. (Suzuki et al. (2003)) found that the global gene expression patterns caused by VP1 overexpression in Arabidopsis were very similar to patterns produced by ABA treatments.

[0179] Regulation by ABI3/VP1 is complex: the protein is a multidomain transcription factor that can apparently function as either an activator or a repressor depending on the promoter context (McCarty et al. (1991); Hattori et al. (1992); Hoecker et al. (1995); Nambara et al. (1995)). In addition to the B3 domain, ABI3/VP1 has two other protein domains (the B1 and B2 domains) that are also highly conserved among ABI3/VP1 factors from various plant species (McCarty et al. (1991)). Targets of the different domains have been identified. Both in Arabidopsis and maize, the B3 domain of ABI3/VP1 binds the RY/SPH motif (Ezcurra et al. (2000)); Carson et al. (1997)), whereas the N terminal B1 and B2 domains are implicated in nuclear localization and interactions with other proteins. In particular, the B2 domain is thought to act via ABA response elements (ABREs) in target promoters. VP1 has been shown to activate ABREs through a core ACGT motif (called the G-Box), but does not bind the element directly. However, a number of bZIP transcription factors have been shown to bind ABREs in the promoters of ABA induced genes (Guiltinan et al. (1990); Jakoby et al. (2002)), and recent data suggest that VP1 might induce ABREs via interactions with these bZIP proteins. Such evidence was afforded by Hobo et al. (1999) who demonstrated interaction between the rice VP1 protein OsVP1 and a rice bZIP protein, TRAB1. While in Arabidopsis the B3 domain of ABI3 is essential for abscisic acid dependent activation of late embryogenesis genes (Ezcurra et al. (2000)), the B3 domain of VP1 is not essential for ABA regulated gene expression in maize seed (Carson et al. (1997), McCarty et al. (1989)), though the B3 domain of G9 RAV2, is able to act as an ABA agonist in maize protoplasts (Gampala et al. (2004)). The difference in the regulatory network between Arabidopsis and maize can be explained by differential usage of the RY/SPH versus the ABRE element in the control of seed maturation gene expression (Ezcurra et al. (2000)). The RY/SPH element is a key element in gene regulation during late embryogenesis in Arabidopsis (Reidt et al. (2000)) while it seems to be less important for seed maturation in maize (McCarty et al. (1989)).

[0180] Similarity to the B3 domain has been found in several other plant proteins, including the Arabidopsis FUSCA3 (FUS3, G1014, SEQ ID NO: 378). The FUS3 protein can be considered as a natural truncation of the ABI3 protein (Luerssen et al. (1998)); like ABI3, FUS3 binds to the RY/SPH element, and can activate expression from target promoters even in non-seed tissues (Reidt et al. (2000)). ABI3 domain is also present in LEAFY COTYLEDON 2 (Luerssen et al. (1998); Stone et al. (2001)). ABI3, FUS3, LEC2 (G3035, SEQ ID NO: 384), and LEAFY COTYLEDON 1 are known to act together to regulate many aspects of seed maturation (Parcy et al. (1997); Parcy and Giraudat (1997); Wobus and Weber (1999)). (LEC1, G620, SEQ ID NO: 358, is a CAAT box binding transcription factor of the HAP3 class, Lotan et al. (1998)). Like abi3 mutants, mutants for these other three genes also show defects in embryo specific programs and have pleiotropic phenotypes, including precocious germination and development of leaf like characters on the cotyledons. Unlike abi3, though, these mutants have almost normal ABA sensitivity and are not directly implicated in ABA signaling (Meinke (1992); Keith et al. (1994); Meinke et al. (1994)). Overexpression of either LEC1 or LEC2 results in ectopic embryo formation (Lotan et al. (1998); Stone et al. (2001)), supporting the role of this gene in the regulation of embryo development.

[0181] Although the ABI3 related genes containing a B3 domain have roles related to abiotic stress tolerance during embryo maturation, it remains to be reported whether all proteins containing a B3 domain have a general role in such responses or in embryo development. Detailed genetic analyses have not been published on the RAV genes; however, RAV1 has been implicated in abiotic stress responses based on the observation that it is transcription up-regulated on cold acclimation (Fowler and Thomashow (2002)). A similar result was seen the RT-PCR studies performed during our initial genomics program, when we found that G867 was up-regulated by cold or auxin treatments. We also found that the G867 paralog, G1930, SEQ ID NO: 92, was up-regulated by cold or auxin treatments.

[0182] It is particularly intriguing that G867 expression was induced by auxin treatment, since transcription factors from the auxin response factor (ARF) class also contain a B3 related domain and respond to auxin (Uimasov et al. (1997)). ARF transcription factors only contain a single DNA binding domain. However, the current models predict that ARFs generally function as dimers (Liscum and Reed (2002)). It is unknown whether G867 could interact with ARF proteins. It has been shown that a G867 monomer is sufficient for DNA binding, yet this does not exclude potential interactions with other proteins.

[0183] Discoveries made in earlier genomics programs. G867 was included based on the enhanced tolerance of 35S::G867 lines to drought related hyperosmotic stresses such as sucrose and salt. Further testing revealed a moderate increase in drought tolerance in a soil based assay, which finally triggered the inclusion in the program.

[0184] Following our initial discovery of G867 in the form of a public EST (GenBank accession N37218) we first examined the function of the gene using a homozygous line that contained a T-DNA insertion immediately downstream of the G867 conserved AP2 domain. This insertion would have been expected to result in a severe or null mutation. However, the KO.G867 plants did not show significant changes in morphological and physiological analyses compared to wild-type controls, suggesting that the gene might have a redundant role with one or more of the other three RAV genes.

[0185] Subsequently, we assessed the function of G867 using 35S::G867 lines; in these assays, most of these lines were recorded as showing no consistent morphological differences to wild type. However, the plants exhibited increased seedling vigor (manifested by increased expansion of the cotyledons) in germination assays on both high salt and high sucrose media, compared to wild-type controls. Overexpression lines for the Arabidopsis paralogs of G867, G1930 and G9, also exhibited stress-related phenotypes, suggesting a general involvement of this clade in abiotic stress responses. 35S::G9 plants also showed increased root biomass and 35S::G1930 lines exhibited tolerance to high salt and sucrose (this phenotype was identical to that seen in 35S::G867 lines). Overexpression lines for the final paralog, G993, SEQ ID NO: 90, however, did not show a significant difference to wild type in our initial physiological assays. However, 35S::G993 seedlings had a variety of developmental defects, and the plants produced seeds, which were pale in coloration, suggesting that the gene might influence seed development.

[0186] Protein structure and properties. G867 lacks introns and encodes a 344 amino acid protein with a predicted molecular weight of 38.6 kDa. Analysis of the binding characteristics of RAV1 (G867) revealed that the protein binds as a monomer to a bipartite target consisting of a CAACA and a CACCTG motif which can be separated by 2-8 nucleotides, and can be present in different relative orientations (Kagaya et al. (1999)). Gel shift analysis using different deletion variants of RAV1 have shown that the AP2 domain recognizes the CAACA motif while the B3 domain interacts with the CACCTG sequence. Although both binding domains function autonomously, the affinity for the target DNA is greatly enhanced when both domains are present (Kagaya et al. (1999)), suggesting that the target DNA can act as an allosteric effector (Lefstin and Yamamoto (1998)).

[0187] AP2 DNA binding domain. The AP2 domain of G867 is localized in the N-terminal region of the protein (FIGS. 7B-7C). The CAACA element recognized by G867 differs from the GCCGCC motif present in ERF (ethylene response factors, Hao et al. (1998); Hao et al. (2002)) target promoters, and from the CCGAC motif involved in regulation of dehydration responsive genes by the CBF/DREB1 and DREB2 group of transcription factors (Sakuma et al. (2002)). In case of the CBF proteins, regions flanking the AP2 domain are very specific and are not found in other Arabidopsis transcription factors. Furthermore, those regions are highly conserved in CBF proteins across species (Jaglo et al. (2001)). The regions flanking the AP2 domain are also highly conserved in G867 and the paralogs G9, G1930, and G993 (SEQ ID NOs: 88, 106, 92 and 90, respectively; FIGS. 7B-7C).

[0188] B3 DNA binding domain. The B3 domain is present in several transcription factor families: RAV, ABI3/VP1, and ARF. It has been shown for all three families that the B3 domain is sufficient for DNA binding (Table 5). However, the binding specificity varies significantly. These differences in target specificity are also reflected at the protein level. Although all B3 domains share certain conserved amino acids, there is significant variation between families. The B3 domain of the RAV proteins G867 (RAV1), G9 (RAV2), G1930, and G993 is highly conserved, and substantially more closely related to the ABI3 than to the ARF family. Despite the fact that the B3 domain can bind DNA autonomously (Kagaya et al. (1999); Suzuki et al. (1997)), in general, B3 domain transcription factors interact with their targets via two DNA binding domains (Table 5). In case of the RAV and ABI3 family, the second domain is located on the same protein. It has been shown for ABI3 (G621) that cooperative binding increases not only the specificity but also the affinity of the interaction (Ezcurra et al. (2000)).

TABLE 5

Binding sites for different B3 domains

| | | | 2nd Domain present in | |
|---|---|---|---|---|
| Family | Binding site | Element | protein | Reference |
| RAV | CACCTG | — | AP2 | Kagaya et al. (1997) |
| ABI3 | CATGCATG | RY/G-box | B2 | Ezcurra et al. (2000) |
| ARF | TGTCTC | AuxRE | other TxF | Ulmasov et al. (1997) |

[0189] Other protein features. A potential bipartite nuclear localization signal has been identified in the G867 protein. A protein scan also revealed several potential phosphorylation sites.

[0190] Examination of the alignment of only those sequences in the G867 clade (having monocot and dicot subnodes), indicates 1) a high degree of conservation of the AP2 domains in all members of the clade, 2) a high degree of conservation of the B3 domains in all members of the clade; and 3) a high degree of conservation of an additional motif, the DML motif found between the AP2 and B3 domains in all members of the clade: (H/R S K Xa E/G I/V V D M L R K/R H T Y Xa E/D/N E L/F Xa Q/H S/N/R/G (where Xa is any amino acid), constituting positions 135-152 in G867 (SEQ ID NO: 88). As a conserved motif found in G867 and its paralogs, the DML motif was used to identify additional orthologs of SEQ ID NO: 88. A significant number of sequences were found that had a minimum of 71% identity to the 22 residue DML motif of G867. The DML motif (FIGS. 7C-7D) between the AP2 and B3 DNA binding domain is predicted to have a particularly flexible structure. This could explain the observation that binding of the bipartite motif occurs with similar efficiency, irrespective of the spacing and the orientation of the two motifs (the distance between both elements can vary from 2-8 bp, Kagaya et al. (1999)). Importantly, the DML motif (FIG. 7C-7D) located between the AP2 domain and the B3 domain is not conserved between the G867 clade and the remaining two RAV genes, G2687, SEQ ID NO: 379, and G2690, SEQ ID NO: 381, which form their own separate clade in the phylogenetic analysis (FIG. 6). This motif presumably has a role in determining the unique function of the G867 clade of RAV-like proteins.

[0191] Known transcriptional activation domains are either acidic, proline rich or glutamine rich (Liu et al. (1999); the G867 protein does not contain any obvious motifs of these types. Repression domains are relatively poorly characterized in plants, but have been reported for some AP2/ERF (Ohta et al. (2001)) factors. The transcription factors AtERF3 and AtERF4 contain a conserved motif ((L/F)DLN(L/F)xP) which is essential for repression (Ohta et al. (2001)). Such a motif is not found in the G867 protein. Transcriptional repression domains have also been reported for some of the ARF-type B3 domain transcription factors (Tiwari et al. (2001); Tiwari et al. (2003)). Following the N-terminal DNA binding domain, ARFs contain a non-conserved region referred to as the middle region (MR), which has been proposed to function as a either a transcriptional repression or an activation domain, depending on the particular protein. Those ARF proteins with a Q rich MR behave as transcriptional activators, whereas most, if not all other ARFs, function as repressors. However, a well-defined repression motif has yet to be identified. (Tiwari et al. (2001); Tiwari et al. (2003)).

[0192] In conclusion, it remains to be resolved whether G867 acts as a transcriptional activator or repressor. It is possible that the protein itself does not contain a regulatory motif, and that its function is a result of either restricting access to certain promoters or the interaction with other regulatory proteins.

### Background Information for G28, the G28 Clade, and Related Sequences

[0193] G28 (SEQ ID NO: 147) corresponds to AtERF1 (GenBank accession number AB008103) (Fujimoto et al. (2000)). G28 appears as gene At4 gl7500 in the annotated sequence of Arabidopsis chromosome 4 (AL161546.2). G28 has been shown to confer resistance to both necrotrophic and biotrophic pathogens. G28 (SEQ ID NO: 148) is a member of the B-3a subgroup of the ERF subfamily of AP2 transcription factors, defined as having a single AP2 domain and having specific residues in the DNA binding domain that distinguish this large subfamily (65 members) from the DREB subfamily (see below). AtERF1 is apparently orthologous to the AP2 transcription factor Pti4, identified in tomato, which has been shown by Martin and colleagues to function in the Pto disease resistance pathway, and to confer broad-spectrum disease resistance when overexpressed in Arabidopsis (Zhou et al. (1997); Gu et al. (2000); Gu et al. (2002)).

[0194] AP2 domain transcription factors. This large transcription factor gene family includes 145 transcription factors (Weigel (1995); Okamuro et al. (1997); Riechmann and Meyerowitz (1998); Riechmann et al. (2000)). Based on the results of our earlier genomics screens it is clear that this family of proteins affect the regulation of a wide range of morphological and physiological processes, including the acquisition of abiotic and biotic stress tolerance. The AP2 family can be further sub-divided as follows:

[0195] [1] The APETALA2 (“C”) class (14 genes) is related to the APETALA2 protein itself (Jofuku et al. (1994)), characterized by the presence of two AP2 DNA binding domains.

[0196] [2] The AP2/ERF group (125 genes) which contain a single AP2 domain. This AP2/ERF class can be further categorized into three subgroups:

[0197] The DREB (“A”) (dehydration responsive element binding) sub-family which comprises 56 genes. Many of the DREBs are involved in regulation of abiotic stress tolerance pathways (Stockinger et al. (1997); Jaglo-Ottosen et al. (1998); Finkelstein et al. (1998); Sakuma et al. (2002)).

[0198] The ERF (ethylene response factor) sub-family (“B”) which includes 65 genes, several of which are involved in regulation of biotic stress tolerance pathways (Ohme-Takagi and Shinshi (1995); Zhou et al. (1997)). The DREB and ERF sub-groups are distinguished by the amino acids present at position 14 and 19 of the AP2 domain: while DREBs are characterized by Val-14 and Glu-19, ERFs typically have Ala-14 and Asp-19. Recent work indicated that those two amino acids have a key function in determining the target specificity (Sakama et al. (2002), Hao et al. (2002)).

[0199] [3] The RAV class (6 genes) all of which have a B3 DNA binding domain in addition to the AP2 DNA binding domain, and which also regulate abiotic stress tolerance pathways.

[0200] The role of ERF transcription factors in stress responses: ERF transcription factors in disease resistance. The first indication that members of the ERF group might be involved in regulation of plant disease resistance pathways was the identification of Pti4, Pti5 and Pti6 as interactors with the tomato disease resistance protein Pto in yeast 2-hybrid assays (Zhou et al. (1997)). Since that time, many ERF genes have been shown to enhance disease resistance when overexpressed in Arabidopsis or other species. These ERF genes include ERF1 (G1266) of Arabidopsis (Berrocal-Lobo et al. (2002); Berrocal-Lobo and Molina, (2004)); Pti4 (Gu et al. (2002)) and Pti5 (He et al. (2001)) of tomato; Tsi1 (Park et al. (2001); Shin et al. (2002)), NtERF5 (Fischer and Droge-Laser (2004)), and OPBP1 (Guo et al. (2004)) of tobacco; CaERFLP1 (Lee et al. (2004)) and CaPF1 (Yi et al. (2004)) of hot pepper; and AtERF1 (G28) and TDR1 (G1792) of Arabidopsis (our data).

[0201] ERF transcription factors in abiotic stress responses. While ERF transcription factors are primarily recognized for their role in biotic stress response, some ERFs have also been characterized as being responsive to abiotic stress. For example, Fujimoto et al. (2000) have shown that AtERF1-5 (corresponding to GIDs: G28 (SEQ ID NO: 148), G1006 (SEQ ID NO: 152), G1005 (SEQ ID NO: 390), G6 (SEQ ID NO: 386) and G1004 (SEQ ID NO: 388) respectively) can respond to various abiotic stresses, including cold, heat, drought, ABA, cycloheximide, and wounding. In addition, several ERF transcription factors that enhance disease resistance when overexpressed also enhance tolerance to various types of hyperosmotic stress. The first published example of this phenomenon was the tobacco gene Tsi1, which was isolated as a salt-inducible gene, and found to enhance salt tolerance and resistance to Pseudomonas syringae pv. tabaci when overexpressed in tobacco (Park et al. (2001)), and resistance to several other pathogens when overexpressed in hot pepper (Shin et al. (2002)). A number of other ERFs have now been shown to confer some degree of disease resistance and hyperosmotic stress tolerance when overexpressed, including OPBP1 of tobacco, which enhances salt tolerance when overexpressed (Guo et al. (2004a)), CaPF1 of hot pepper, which produces freezing tolerance when overexpressed (Yi et al. (2004)), and CaERFLP1 of hot pepper, which enhances salt tolerance when overexpressed (Lee et al. (2004a)). These proteins represent different subclasses of ERFs: Tsi1 is an ERFB-5, OPBP1 is an ERFB-3c, and CaPF1 and CaERFLP1 are in the ERF-B2 class, demonstrating that the capacity to enhance biotic and abiotic stress tolerance is distributed throughout the ERF family.

[0202] Regulation of ERF transcription factors by pathogen and small molecule signaling. ERF genes show a variety of stress-regulated expression patterns. Regulation by disease-related stimuli such as ethylene (ET), jasmonic acid (JA), salicylic acid (SA), and infection by virulent or avirulent pathogens has been shown for a number of ERF genes (Fujimoto et al. (2000); Gu et al. (2000); Chen et al. (2002a); Cheong et al., (2002); Onate-Sanchez and Singh (2002); Brown et al. (2003); Lorenzo et al. (2003)). However, some ERF genes are also induced by wounding and abiotic stresses, as discussed above (Fujimoto et al. (2000); Park et al. (2001); Chen et al. (2002a); Tournier et al. (2003)). Currently, it is difficult to assess the overall picture of ERF regulation in relation to phylogeny, since different studies have concentrated on different ERF genes, treatments and time points.

[0203] Significantly, several ERF transcription factors that confer enhanced disease resistance when overexpressed, such as ERF1 (G1266), Pti4, and AtERF1 (G28), are transcriptionally regulated by pathogens, ET, and JA (Fujimoto et al. (2000); Onate-Sanchez and Singh (2002); Brown et al. (2003); Lorenzo et al. (2003)). ERF1 is induced synergistically by ET and JA, and induction by either hormone is dependent on an intact signal transduction pathway for both hormones, indicating that ERF1 may be a point of integration for ET and JA signaling (Lorenzo et al. (2003)). At least 4 other ERFs are also induced by JA and ET (Brown et al. (2003)), implying that other ERFs are probably also important in ET/JA signal transduction. A number of the ERF proteins in subgroup 1, including AtERF3 and AtERF4, are thought to act as transcriptional repressors (Fujimoto et al. (2000)), and these two genes were found to be induced by ET, JA, and an incompatible pathogen (Brown et al. (2003)). The net transcriptional effect on these pathways may be balanced between activation and repression of target genes.

[0204] The SA signal transduction pathway can act antagonistically to the ET/JA pathway. Interestingly, Pti4 and AtERF1 (G28) are induced by SA as well as by JA and ET (Gu et al. (2000); Onate-Sanchez and Singh (2002)). Pti4, Pti5 and Pti6 have been implicated indirectly in regulation of the SA response, perhaps through interaction with other transcription factors, since overexpression of these genes in Arabidopsis induced SA-regulated genes without SA treatment and enhanced the induction seen after SA treatment (Gu et al. (2002)).

[0205] Post-transcriptional regulation of ERF genes by phosphorylation may be a significant form of regulation. Pti4 has been shown to be phosphorylated specifically by the Pto kinase, and this phosphorylation enhances binding to its target sequence (Gu et al. (2000)). Recently, the OsEREBP1 protein of rice has been shown to be phosphorylated by the pathogen-induced MAP kinase BWMK1, and this phosphorylation was shown to enhance its binding to the GCC box (Cheong et al. (2003)), suggesting that phosphorylation of ERF transcription factors may be a common theme. A potential MAPK phosphorylation site has been noted in AtERF5 (Fujimoto et al. (2000)).

[0206] Protein structure and properties. G28 lacks introns and encodes a 266 amino acid protein with a predicted molecular weight of 28.9 kDa. Specific conserved motifs have been identified through alignments with other related ERFs (e.g., FIGS. 11A-11B and FIGS. 13D-13E).

[0207] AP2 DNA binding domain. The AP2 domain of G28 is relatively centrally positioned in the intact protein (FIGS. 13D-13E). G28 has been shown to bind specifically to the AGCCGCC motif (GCC box: Hao et al. (1998); Hao et al. (2002)). Our analysis of the G28 regulon by global transcript profiling is consistent with this, as the 5′ regions of genes up-regulated by G28 are enriched for the presence of AGCCGCC motifs. The AP2 domain of AtERF1 (G28) was purified and used by Allen et al. (1998) in solution NMR studies of the AP2 domain and its interaction with DNA. This analysis indicated that certain residues in three beta-strands are involved in DNA recognition, and that an alpha helix provides structural support for the DNA binding domain.

[0208] Other protein features. A potential bipartite nuclear localization signal has been reported in the G28 protein. A protein scan also revealed several potential phosphorylation sites, but the conserved motifs used for those predictions are small, have a high probability of occurrence. However, the orthologous Pti4 sequence has been shown to be phosphorylated in multiple locations, which have yet to be mapped in detail. A protein alignment of closely related ERF sequences indicates the presence of conserved domains unique to B-3a ERF proteins. For example, a motif not found in other Arabidopsis transcription factors is found directly C-terminal to the AP2 domain in dicot sequences, but is not found in monocot sequences. Another conserved motif is found 40-50 amino acids N-terminal to the AP2 DNA binding domain. The core of this motif is fairly well conserved in both dicots and monocots, but extensions of the motif are divergent between dicots and monocots. The identification of specific motifs unique to small clades of ERF transcription factors suggests that these motifs may be involved in specific interactions with other protein factors involved in transcriptional control, and thereby may determine functional specificity. Known transcriptional activation domains are either acidic, proline rich or glutamine rich (Liu et al. (1999)). The G28 protein contains one acid-enriched region (overlapping with the first dicot-specific motif). There is also evidence that regions rich in serine, threonine, and proline may function in transcriptional activation (Silver et al. (2003)). There are two ser/pro-enriched regions in the region N-terminal to the AP2 domain. None of these domains has yet to be demonstrated directly to have a role in transcriptional activation.

[0209] Our Earlier Discoveries related to G28. G28 is included in the current disease program based on the enhanced tolerance of 35S::G28 lines to Sclerotinia, Botrytis, and Erysiphe demonstrated in our earlier genomics program. Resistance to Sclerotinia, and Botrytis was confirmed in the present soil-based assays. Follow-up work also demonstrated enhanced tolerance to Phytophthora capsisci (data not shown).

[0210] Further testing confirmed that this increased disease resistance is not achieved at the expense of susceptibility to other pathogens (e.g., Pseudomonas syringae and Fusarium oxysporum). Although no significant growth penalty was observed with the initial transgenic lines studied in the genomics program, subsequent analysis of a larger population of transgenic lines in the phase I SBIR program revealed a detectable growth penalty, particularly during early growth stages. The magnitude of this growth penalty correlated with expression level as measured by quantitative RT-PCR. A slight delay in flowering (1 to 2 days) was also observed at the highest expression levels. We observed no differences between G28 overexpressing plants and wild-type plants in germination efficiency, number of leaves per plant, inflorescence weight, silique weight, or chlorophyll content.

[0211] Regulation of G28. Induction of G28 (AtERF1) by pathogens, ethylene, methyl jasmonate, and salicylic acid has been published (Chen et al. (2002a); Fujimoto et al. (2000); Onate-Sanchez and Singh (2002)). Our RT-PCR experiments have confirmed induction by Botrytis, SA and JA (data not shown).

### Background Information for G1792, the G1792 Clade, and Related Sequences

[0212] G1792 (SEQ ID NO: 221, 222) is part of both the drought and disease programs. Background information relevant to each of these traits is presented below.

[0213] We first identified G1792 (AT3G23230) as a transcription factor in the sequence of BAC clone K14B15 (AB025608, gene K14B15.14). We have assigned the name TRANSCRIPTIONAL REGULATOR OF DEFENSE RESPONSE 1 (TDR1) to this gene, based on its apparent role in disease responses. The G1792 protein contains a single AP2 domain and belongs to the ERF class of AP2 proteins. A review of the different sub-families of proteins within the AP2 family is provided in the information provided for G28, above. The G28 disclosure provided herein includes description of target genes regulated by ERF transcription factors, the role of ERF transcription factors in stress responses: ERF transcription factors in disease resistance, ERF transcription factors in abiotic stress responses, regulation of ERF transcription factors by pathogen and small molecule signaling, etc., which also pertain to G1792.

[0214] G1792 overexpression increases survivability in a soil-based drought assay. 35S::G1792 lines exhibited markedly enhanced drought tolerance in a soil-based drought screen compared to wild-type, both in terms of their appearance at the end of the drought period, and in survival following re-watering.

[0215] G1792 overexpression produces disease resistance. 35S::G1792 plants were more resistant to the fungal pathogens Fusarium oxysporum and Botrytis cinerea: they showed fewer symptoms after inoculation with a low dose of each pathogen. This result was confirmed using individual T2 lines. The effect of G1792 overexpression in increasing resistance to pathogens received further, incidental confirmation. T2 plants of 35S::G1792 lines 5 and 12 were being grown (for other purposes) in a room that suffered a serious powdery mildew infection. For each line, a pot of 6 plants was present in a flat containing 9 other pots of lines from unrelated genes. In either of the two different flats, the only plants that were free from infection were those from the 35S::G1792 line. This observation suggested that G1792 overexpression increased resistance to powdery mildew.

[0216] G1792 overexpression increases tolerance to growth on nitrogen-limiting conditions. 35S::G1792 transformants showed more tolerance to growth under nitrogen-limiting conditions. In a root growth assay under conditions of limiting N, 35S::G1792 lines were slightly less stunted. In an germination assay that monitors the effect of carbon on nitrogen signaling through anthocyanin production (with high sucrose+/−glutamine; Hsieh et al. (1998)), the 35S::G1792 lines made less anthocyanin on high sucrose (+glutamine), suggesting that the gene could be involved in the plants ability to monitor carbon and nitrogen status.

[0217] G1792 overexpression causes morphological alterations. Plants overexpressing G1792 showed several mild morphological alterations: leaves were dark green and shiny, and plants bolted, and subsequently senesced, slightly later than wild-type controls. Among the T1 plants, additional morphological variation (not reproduced later in the T2 plants) was observed: many showed reductions in size as well as aberrations in leaf shape, phyllotaxy, and flower development.

[0218] Follow-up work in disease. G1792 has three potential paralogs, G30, G1791 and G1795 (SEQ ID NOs: 226, 230, and 224, respectively), which were not assayed for disease resistance in the genomics program because their overexpression caused severe negative side effects. Some evidence suggested that these genes might play a role in disease resistance: expression of G1795 and G1791 was induced by Fusarium, and G1795 by salicylic acid, in RT-PCR experiments, and the lines shared the glossy phenotype observed for G1792. Phylogenetic trees based on whole protein sequences do not always make the relationship of these proteins to G1792 clear; however, the close relationship of these proteins is evident in an alignment (FIG. 11A-11B, FIG. 19) and in a phylogenetic analysis (FIG. 18) based on the conserved AP2 domain and a second conserved motif (FIG. 19; the EDLL domain described below).

[0219] G1792, G1791, G1795 and G30 were expressed under the control of four different promoters using the two-component system. The promoters chosen were 35S, RBCS3 (mesophyll or photosynthetic-specific), LTP1 (epidermal-specific), and 35S::LexA:GAL4:GR (dexamethasone-inducible). All promoters other than 35S produced substantial amelioration of the negative side effects of transcription factor overexpression.

[0220] Five lines for each combination were tested with Sclerotinia, Botrytis, or Fusarium. Interestingly, G1791 and G30 conferred significant resistance to Sclerotinia when expressed under RBCS3 or 35S::LexA:GAL4:GR, even though G1792 does not confer Sclerotinia resistance. These results support the hypothesis that genes of this clade confer disease resistance when expressed under tissue specific or inducible promoters.

TABLE 6
Disease screening of G1792 and paralogs under different promoters

| | G1792 | | | G1791 | | | G1795 | | | G30 | | |
|---|---|---|---|---|---|---|---|---|---|---|---|---|
| | SEQ ID NO: | | | | | | | | | | | |
| | 222 | | | 230 | | | 224 | | | 226 | | |
| | B | S | F | B | S | F | B | S | F | B | S | F |
| 35S | ++ | wt | + | nd | nd | nd | nd | nd | nd | nd | nd | nd |
| RBCS3 | + | wt | + | wt | wt | wt | ++ | ++ | wt | + | + | wt |
| LTP1 | wt | wt | nd | + | wt | wt | ++ | + | wt | + | wt | wt |
| Dex-ind. | ++ | wt | + | ++ | ++ | wt | ++ | ++ | wt | ++ | ++ | wt |

Abbreviations and symbols:
B, Botrytis
S, Sclerotinia
F, Fusarium
Scoring:
wt, wild-type (susceptible) phenotype
+, mild to moderate resistance
++, strong resistance
nd, not determined

[0221] Domains. In addition to the AP2 domain (domains of G1792 clade members are shown in Table 15), G1792 contains a putative activation domain. This domain (Table 15) has been designated the “EDLL domain” based on four amino acids that are highly conserved across paralogs and orthologs of G1792 (FIG. 19).

[0222] Tertiary Structure. The solution structure of an ERF type transcription factor domain in complex with the GCC box has been determined (Allen et. al., 1998). It consists of a β-sheet composed of three strands and an α-helix. Flanking sequences of the AP2 domain of this protein were replaced with the flanking sequences of the related CBF1 protein, and the chimeric protein was found to contain the same arrangement of secondary structural elements as the native ERF type protein (Allen et al. (1998)). This implies that the secondary structural motifs may be conserved for similar ERF type transcription factors within the family.

[0223] DNA Binding Motifs. Two amino acid residues in the AP2 domain, Ala-14 and Asp-19, are definitive of the ERF class transcription factors Sakuma et al. (2002). Recent work indicates that these two amino acids have a key function in determining binding specificity (Sakuma et al. (2002), Hao et al. (2002)) and interact directly with DNA. The 3-dimensional structure of the GCC box complex indicates the interaction of the second strand of the β-sheet with the DNA.

### Background Information for G47, the G47 Clade, and Related Sequences

[0224] G47 (SEQ ID NO: 173, AT1G22810) encodes a member of the AP2 class of transcription factors (SEQ ID NO: 174) and was included based on the resistance to drought-related abiotic stress exhibited by 35S::G47 Arabidopsis lines and by overexpression lines for the closely related paralog, G2133 (SEQ ID NO: 176, AT1G71520). A detailed genetic characterization has not been reported for either of these genes in the public literature.

[0225] AP2 Family transcription factors. Based on the results of our earlier genomics screens, it is clear that this family of proteins affect the regulation of a wide range of morphological and physiological processes, including the acquisition of stress tolerance. The AP2 family can be further divided into subfamilies as detailed in the G28 section, above.

[0226] G47 and G2133 protein structure. G47 and G2133 comprise a pair of highly related proteins (FIG. 15) and are members of the AP2/ERF subfamily. Both proteins possess an AP2 domain at the amino terminus and a somewhat acidic region at the C-terminus that might constitute an activation domain. A putative bipartite NLS is located at the start of the AP2 domain in both proteins. Sakuma et al. (Sakuma et al. (2002)) categorized these factors within the A-5 class of the DREB related sub-group based on the presence of a V residue at position 14 within the AP2 domain. Importantly, however, position 19 within the AP2 domain is occupied by a V residue in both G2133 and G47, rather than an E residue, as is the case in the majority of DREBs. Additionally, the “RAYD-box” within the AP2 domains of these two proteins is uniquely occupied by the sequence VAHD (FIG. 15), a combination not found in any other Arabidopsis AP2/ERF protein (Sakuma et al. (2002)). These differences to other AP2 proteins could confer unique DNA binding properties on G2133 and G47.

[0227] Discoveries made in earlier genomics programs. We initially identified G47 in 1998, as an AP2 domain protein encoded within the sequence of BAC T22J18 (GenBank accession AC003979) released by the Arabidopsis Genome Initiative. We then confirmed the boundaries of the gene by RACE and cloned a full-length cDNA clone by RT-PCR. G2133 was later identified within BAC F3I17 (GenBank accession AC016162) based on its high degree of similarity to G47. Both genes were analyzed by overexpression analysis during our earlier genomics program.

[0228] Morphological effects of G47 and G2133 overexpression. A number of striking morphological effects were observed in 35S::G47 lines. At early stages, the plants were somewhat reduced in size. However, these lines flowered late and eventually developed an apparent increase in rosette size compared to mature wild-type plants. Additionally, the 35S::G47 plants showed a marked difference in aerial architecture; inflorescences displayed a short stature, had a reduction in apical dominance, and developed thick fleshy stems. When sections from these stems were stained and examined, it was apparent that the vascular bundles were grossly enlarged compared to wild-type. Similar morphological changes were apparent in shoots of 35S::G2133 lines, but most of the 35S::G2133 lines exhibited much more severe dwarfing at early stages compared to 35S::G47 lines. Nevertheless, at later stages, a number of 35S::G2133 lines showed a very similar reduction of apical dominance and a fleshy appearance comparable to that seen in 35S::G47 lines.

[0229] Physiological effects of G47 and G2133 overexpression. Both 35S::G2133 lines and 35S::G47 lines exhibited abiotic stress resistance phenotypes in the screens performed during our earlier genomics program. 35S::G47 lines displayed increased tolerance to hyperosmotic stress (PEG) whereas 35S::G2133 lines were more tolerant to the herbicide glyphosate compared to wild type.

[0230] The increased tolerance of 35S::G47 lines to PEG, combined with the fleshy appearance and altered vascular structure of the plants, led us to test these lines in a soil drought screen. 35S::G2133 lines were also included in that assay, given the close similarity between the two proteins and the comparable morphological effects obtained. Both 35S::G47 and 35S::G2133 lines showed a strong performance in that screen and exhibited markedly enhanced drought tolerance compared to wild-type, both in terms of their appearance at the end of the drought period, and in survivability following re-watering. In fact, of the approximately 40 transcription factors tested in that screen, 35S::G2133 lines showed the top performance in terms of each of these criteria.

### Background Information for G1274, the G1274 Clade, and Related Sequences

[0231] G1274 (SEQ ID NO: 185) from Arabidopsis encodes a member of the WRKY family of transcription factors (SEQ ID NO: 186) and was included based primarily on soil-based drought tolerance exhibited by 35S::G1274 Arabidopsis lines. G1274 corresponds to AtWRKY51 (At5g64810), a gene for which there is currently no published information.

[0232] WRKY transcription factors. WRKY genes appear to have originated in primitive eukaryotes such as Giardia lamblia, Dictyostelium discoideum, and the green alga Chliamydomonas reinhardtii, and have since greatly expanded in higher plants (Zhang and Wang (2005)). In Arabidopsis alone, there are more than 70 members of the WRKY superfamily. The defining feature of the family is the ˜57 amino acid DNA binding domain that contains a conserved WRKYGQK heptapeptide motif. Additionally, all WRKY proteins have a novel zinc-finger motif contained within the DNA binding domain. There are three distinct groups within the superfamily, each principally defined by the number of WRKY domains and the structure of the zinc-finger domain (reviewed by Eulgem et al. (2000)). Group I members have two WRKY domains, while Group II members contain only one. Members of the Group II family can be further split into five distinct subgroups (IIa-e) based on conserved structural motifs. Group III members have only one WRKY domain, but contain a zinc finger domain that is distinct from Group II members. The majority of WRKY proteins are Group II members, including G1274 and the related genes being studied here. An additional common feature found among WRKY genes is the existence of a conserved intron found within the region encoding the C-terminal WRKY domain of group I members or the single WRKY domain of group II/III members. In G1274, this intron occurs between the sequence encoding amino acids R130 and N131.

[0233] The founding members of the WRKY family are SPF1 from sweet potato (Ishiguro and Nakamura, 1994), ABF1/2 from oat (Rushton et al. (1995)), PcWRKY1,2,3 from parsley (Rushton et al. (1996)) and ZAP1 from Arabidopsis (de Pater et al. (1996)). These proteins were identified based on their ability to bind the so-called W-box promoter element, a motif with the sequence (T)(T)TGAC(C/T). Binding of WRKY proteins to this motif has been demonstrated both in vivo and in vitro (Rushton et al. (1995); de Pater et al. (1996); Eulgem et al., (1999); Yang et al. (1999); Wang et al. (1998). Additionally, the solution structure of the WRKY4 protein (G884, AT1G13960) has recently been reported (Yamasaki et al. (2005)). In this study, a DNA titration experiment strongly indicates that the conserved WRKYGQK sequence is directly involved in DNA binding. This element is remarkably conserved, and found in many genes associated with the plant defense response.

[0234] The two WRKY domains of Group I members appear functionally distinct, and it is the C-terminal sequence that appears to mediate sequence-specific DNA binding. The function of the N-terminal domain is unclear, but may contribute to the binding process, or provide an interface for protein-protein interactions. The single WRKY domain in Group II members appears more like the C-terminal domain of Group I members, and likely performs the similar function of DNA binding.

[0235] Structural features of G1274. The primary amino acid sequences for the predicted G1274 protein and related polypeptides are presented in FIG. 17A-17H. The G1274 sequence possesses a potential serine-threonine-rich activation domain and putative nuclear localization signals. The “WRKY” (DNA binding) domain, indicated by the horizontal line and the angled arrow “ [symbol] ”, and zinc finger motif, with the pattern of potential zinc ligands C-X₄₋₅-C—X₂₂₋₂₃-H-X₁-H, indicated by boxes in FIGS. 17E-17F, are also shown.

[0236] Discoveries made in earlier genomics programs. G1274 expression in wild-type plants was detected in leaf, root and flower tissue. Expression of G1274 was also enhanced slightly by hyperosmotic and cold stress treatments, and by auxin or ABA application. Additionally, the gene appears induced by Erysiphe infection and salicylic acid treatment, consistent with the known role of WRKY family members in defense responses. The closely related gene G1275 (SEQ ID NO: 207) is strongly repressed in wild-type plants during soil drought, and remains significantly down-regulated compared to well-watered plants even after rewatering.

[0237] In G1274 overexpression studies, transformed lines were more tolerant to low nitrogen conditions and were less sensitive to chilling than wild-type plants. G1274 overexpressing seedlings were also hits in a C:N sensing screen, indicating that G1274 may alter the plants ability to modulate carbon and/or nitrogen uptake and utilization. G1274 overexpression also produced alterations in inflorescence and leaf morphology. Approximately 20% of overexpressors were slightly small and developed short inflorescences that had reduced internode elongation. Overall, these plants were bushier and more compact in stature than wild-type plants. In T2 populations, rosettes of some 35S::G1274 plants were distinctly broad with greater biomass than wild-type.

[0238] 35S::G1274 plants also out-performed wild-type plants in a soil drought assay; these results are presented in greater detail in Example XIII.

[0239] Overexpression of G1275 (AtWRKY50), a gene closely related to G1274 and also being studied here, had a more severe effect on morphology than G1274. 35S::G1275 plants were small, with reduced apical dominance and stunted inflorescences. While the plants were fertile, seed yield was low and these plants were not tested in physiological assays. In wild-type plants, this gene, similar to G1274, appeared to be induced by various stresses, but had a different overall expression pattern. G1275 was primarily expressed in rosettes and siliques, and had lower but detectable expression in shoots, roots, flowers and embryos.

[0240] The final Arabidopsis gene included in this study group, G1758 (SEQ ID NO: 393, AtWRKY59) was highly induced by salicylic acid, and slightly by Erysiphe and auxin, but no other treatments or stresses. In wild-type plants, this gene is primarily expressed in roots, rosettes, siliques and germinating seedlings. Morphologically and physiologically, 35S::G1758 plants were similar to wild-type.

[0241] In general, there have been several studies that indicate WRKY genes are induced by a wide variety of abiotic stresses (Zhang and Wang (2005)), including drought (Pnueli et al. (2002); Mare et al. (2004); Zou et al. (2004)). However, to date, there are no examples in the literature of cases where altered expression of WRKY proteins has been directly used to provide drought tolerance.

### Background Information for G2999, the G2999 Clade, and Related Sequences

[0242] G2999 (SEQ ID NO: 255, AT2G18350) encodes a member of the ZF-HD class of transcription factors ((SEQ ID NO: 256) and was included based on the resistance to drought-related abiotic stress exhibited by 35S::G2999 lines.

[0243] Identification of ZF-HD transcription factors and their role in plants. The ZF-HD family of transcriptional regulators was identified by Windhovel et al. (2001), while studying the regulatory mechanisms responsible for the mesophyll-specific expression of the C4 phosphoenolpyruvate carboxylase (PEPC) gene from the genus Flavaria. Using a yeast one-hybrid screen, these workers recovered five cDNA clones, which encoded proteins capable of activating the promoter of the Flavaria C4 PEPC gene. One of the five clones encoded histone H4. However, the remaining four clones (FtHB1 [GenBank accession=Y18577, our “GID” identifier=G3859, SEQ ID NO: 413], FbHB2 [GenBank accession=Y18579, our “GID” identifier=G3668, SEQ ID NO: 415], FbHB3 [GenBank accession=Y18580, our “GID” identifier=G3860, SEQ ID NO: 417], and FbHB4 [GenBank accession ═Y18581, our “GID” identifier=G3861, 419]) all encoded a novel type of protein that contained two types of highly conserved domains. At the C-termini, a region was apparent that had many of the features of a homeodomain, whereas at the N-termini, two zinc finger motifs were present. Given the presence of zinc fingers and the potential homeodomain, Windhovel et al. (2001), named the new family of proteins as the ZF-HD group.

[0244] Using BLAST searches we have identified a variety of ZF-HD proteins from a variety of other species, including rice and corn (FIG. 20 and FIGS. 21A-21J).

[0245] Structural features of ZF-HD proteins. The primary amino acid sequence of the G2999 product, showing the relative positions of the ZF and HD domains, is presented in FIGS. 21D-21E and FIGS. 21H-21I. G2999 comprises an acidic region at the N-terminus which might represent an activation domain and a number of motifs which might act as nuclear localization signals.

[0246] Secondary structure analyses performed by Windhovel et al. (Windhovel et al. (2001)) revealed that the putative homeodomains of the newly identified ZF-HD proteins contained three alpha helices with features similar to those in the classes of homeodomain already known in plants (Duboule (1994); Burglin (1997); Burglin (1998)). Interestingly, though, if full-length proteins of the ZF-HD group are BLASTed against plant protein databases, they do not preferentially align with known classes of plant homeodomain proteins. In fact, the ZF-HD proteins from plants appear to be more closely related to the LIM homeodomain proteins from animals than any of the previously known classes of plant homeodomain proteins (Windhovel et al. (2001)).

[0247] It is well established that homeodomain proteins are transcription factors, and that the homeodomain is responsible for sequence specific recognition and binding of DNA (Affolter et al. (1990); Hayashi and Scott (1990), and references therein). Genetic and structural analysis indicate that the homeodomain operates by fitting the most conserved of three alpha helices, helix 3, directly into the major groove of the DNA (Hanes and Brent (1989); Hanes and Brent (1991); Kissinger et al. (1990); Wolberger et al. (1991); Duboule (1994)). A large number of homeodomain proteins have been identified in a range of higher plants (Burglin (1997); Burglin (1998)), and we will define these as containing the ‘classical’ type of homeodomain. These all contain the signature WFXNX[RX] (X=any amino acid, [RK] indicates either an R or K residue at this position) within the third helix.

[0248] Data from the Genome Initiative indicate that there are around 90 “classical” homeobox genes in Arabidopsis. These are now being implicated in the control of a host of different processes. In many cases, plant homeodomains are found in proteins in combination with additional regulatory motifs such as leucine zippers. Classical plant homeodomain proteins can be broadly categorized into the following different classes based on homologies within the family, and the presence of other types of domain: KNOX class I, KNOX class II, HD-BEL1, HD-ZIP class I, HD-ZIP class II, HD-ZIP class III, HD-ZIP class IV (GL2 like), PHD finger type, and WUSCHEL-like (Freeling and Hake (1985); Vollbrecht et al. (1991); Schindler et al. (1993); Sessa et al. (1994); Kerstetter et al. (1994); Kerstetter et al. (1997); Burglin (1997); Burglin (1998); Schoof et al. (2000)). A careful examination of the ZF-HD proteins reveals a number of striking differences to other plant homeodomains. The ZF-HD proteins all lack the conserved F residue within the conserved WFXNX[RK] (X=any amino acid, [RK] indicates either an R or K residue at this position) motif of the third helix. Additionally, there are four amino acids inserted in the loop between first and second helices of the ZF-HD proteins, whereas in other HD proteins there are a maximum of three amino acids inserted in this position (Burglin (1997)). When these homeodomains are aligned with classical homeodomains from plants, they form a very distinct clade within the phylogeny (FIGS. 20 and 21H-21I). Thus, these structural distinctions within the homeodomain could confer functional properties on ZF-HD proteins that are different to those found in other HD proteins.

[0249] The zinc finger motif at the N-terminus is highly conserved across the ZF-HD family. An alignment showing this region from the 14 Arabidopsis ZF-HD proteins and selected ZF-HD proteins from other species is shown in FIGS. 21D-21E and 21H-21I. Yeast two-hybrid experiments performed by Windhovel et al. (2001) demonstrated that ZF-HD proteins form homo and heterodimers through conserved cysteine residues within this region.

[0250] Homeodomain transcription factors that also possess a zinc finger domain exist in animals (Mackay and Crossley (1998)) and these include the LIM homeodomains. In fact the plant ZF-HD factors are more closely related to the animal LIM homeodomains than they are to the other classes of plant homeodomain proteins (Windhovel et al. (2001)). However, the ZF regions of the animal proteins are very different to those in the plant ZF-HD factors, and substantial similarity is only found within the homeodomain.

[0251] Discoveries made in earlier genomics programs. Following the publication of the Windhovel et al. (2001) study, we identified fourteen ZF-HD factors in the Arabidopsis genome sequence. An alignment of the full-length proteins and a phylogenetic tree based on that alignment are shown in FIGS. 21A-21J. Analysis of ZF-HB genes was performed. None of the genes were analyzed by KO analysis, but we examined the phenotypes of Arabidopsis overexpression lines for 12 of the 14 family members. Compared to other transcription factor families, the ZF-HD family yielded a disproportionate number of abiotic stress related phenotypes, with 6 of the 12 genes analyzed, generating phenotypes in this category (Table 7).

TABLE 7
Summary of results of overexpression of the Arabidopsis
ZF-HD family members obtained during genomics screens

| | SEQ ID | Morphological phenotypes obtained on | Abiotic stress related phenotypes obtained on |
|---|---|---|---|
| GID | NO: | overexpression during genomics screens | overexpression during genomics screens |
| G2989 | 280 | Early flowering noted, but phenotype | Wild-type |
| | | variable between lines and generations | |
| G2990 | 284 | Wild-type | Altered response to growth on low N media |
| G2991 | 282 | Some dwarfing and retarded growth, but | Wild-type |
| | | phenotype variable between lines and | |
| | | generations | |
| G2992 | 286 | Early flowering and reduced size | Increased NaCl tolerance in germination |
| | | | assay; increased anthocyanin production in |
| | | | C/N sensing assay; slight chlorosis when |
| | | | grown on MS media |
| G2993 | 276 | Reduced size, slow development, | Decreased hyperosmotic stress tolerance in |
| | | delayed flowering, dark coloration | germination assay; increased sensitivity to |
| | | | growth in cold; reduced secondary root |
| | | | growth on MS media |
| G2994 | | Wild-type | Wild-type |
| G2995 | 288 | Not analyzed | Not analyzed |
| G2996 | 270 | Some size variation between lines | Decreased tolerance to growth on mannitol |
| | | | media |
| G2997 | 264 | Some size variation between lines | Wild-type |
| G2998 | 258 | Delayed flowering | Increased NaCl tolerance in germination assay |
| G2999 | 256 | Wild-type | Increased NaCl tolerance in growth assay |
| G3000 | 260 | Not analyzed | Not analyzed |
| G3001 | 272 | Wild-type | Wild-type |
| G3002 | 290 | Early flowering noted, but phenotype | Wild-type |
| | | variable between lines and generations | |

[0252] G2999 was initially included as a candidate for the drought program based on the enhanced salt tolerance observed in overexpression lines for G2999, and overexpression lines for the closest paralog, G2998. Overexpression lines for a third gene that is a potential paralog, G3000, were not analyzed during our earlier genomics program. 35S::G2999 lines were subsequently tested in a soil drought assay and showed a good performance in terms of both tolerance to drought and survivability following re-watering at the end of a drought period (Example XIII). Lines for the ZF-HD family members G2992 and G2998 were also included in the soil drought screen. Lines for both of these genes showed improved drought resistance compared to wild-type (in terms of their appearance at the end of a drought treatment), but showed a somewhat lower survivability to the drought than controls following re-watering.

### Background Information for G3086, the G3086 Clade, and Related Sequences

[0253] G3086 (SEQ ID NO: 291-292, AT1G51140) confers tolerance to drought related stress as exhibited by 35S::G3086 Arabidopsis lines. No detailed characterization of G3086 has been presented in the public literature.

[0254] G3086 belongs to the basic/helix-loop-helix (bHLH) family of transcription factors. This family is defined by the bHLH signature domain, which consists of 60 amino acids with two functionally distinct regions. The basic region, located at the N-terminal end of the domain, is involved in DNA binding and consists of 15 amino acids with a high number of basic residues. The HLH region, at the C-terminal end, functions as a dimerization domain (Murre et al. (1989); Ferre-D'Amare et al. (1994)) and is constituted mainly of hydrophobic residues that form two amphipathic helices separated by a loop region of variable sequence and length (Nair and Burley (2000)). Outside of the conserved bHLH domain, these proteins exhibit considerable sequence divergence (Atchley et al. (1999)). Cocrystal structural analysis has shown that the interaction between the HLH regions of two separate polypeptides leads to the formation of homodimers and/or heterodimers and that the basic region of each partner binds to half of the DNA recognition sequence (Ma et al. (1994); Shimizu et al. (1997)). Some bHLH proteins form homodimers or restrict their heterodimerization activity to closely related members of the family. On the other hand, some can form heterodimers with one or several different partners (Littlewood and Evan (1998).

[0255] The core DNA sequence motif recognized by the bHLH proteins is a consensus hexanucleotide sequence known as the E-box (5′-CANNTG-3′). There are different types of E-boxes, depending on the identity of the two central bases. One of the most common is the palindromic G-box (5′-CACGTG-3′). Certain conserved amino acids within the basic region of the protein provide recognition of the core consensus site, whereas other residues in the domain dictate specificity for a given type of E-box (Robinson et al. (2000)). In addition, flanking nucleotides outside of the hexanucleotide core have been shown to play a role in binding specificity (Littlewood and Evan (1998); Atchley et al. (1999); Massari and Murre (2000)), and there is evidence that a loop residue in the protein plays a role in DNA binding through elements that lie outside of the core recognition sequence (Nair and Burley (2000)).

[0256] We have identified 153 Arabidopsis genes encoding bHLH transcription factors; together they comprise one of the largest transcription factor gene families. Although several other sequenced eukaryotes also have large bHLH families, when expressed as a percentage of the total genes present in the genome, Arabidopsis has the largest relative representation at 0.56% of the identified genes, compared with yeast (0.08%), Caenorhabditis elegans (0.20%), Drosophila (0.40%), puffer fish (Takifugu rubripes) (0.40%), human (0.40%), and mouse (0.50%). This observation suggests that the bHLH factors have evolved to assume a major role in plant transcriptional regulation. On the other hand, plant bHLHs appear to have evolved a narrower spectrum of variant sequences within the bHLH domain than those of the mammalian systems and appear to lack some of the various ancillary signature motifs, such as the PAS and WRPW domains, found in certain bHLH protein subclasses in other organisms (Riechmann et al. (2000); Ledent and Vervoort (2001); Mewes et al. (2002); Waterston et al. (2002)).

[0257] In spite of this large number of genes in the bHLH transcription factor family, relatively few plant bHLH proteins have been described in the public literature to date, and the family remains largely uncharacterized in terms of the identification of its members and the biological processes they control within publicly available data. A genomics based analysis of plant bHLH proteins have recently been the subject of several extensive reviews (Buck and Atchley (2003); Heim et al. (2003); Toledo-Ortiz et al. (2003); Bailey et al. (2003)).

[0258] Protein structure. There are two important functional activities determined by the amino acid sequence of the bHLH domain: DNA binding and dimerization. The basic region in the bHLH domain determines the DNA binding activity of the protein (Massari and Murre (2000)). The DNA binding bHLH category can be subdivided further into two subcategories based on the predicted DNA binding sequence: (1) the E-box binders and (2) the non-E-box binders (Toledo-Ortiz et al. (2003)) based on the presence or absence of two specific residues in the basic region: Glu-319 and Arg-321. These residues constitute the E-box recognition motif, because they are conserved in the proteins known to have E-box binding capacity (Fisher and Goding (1992); Littlewood and Evan (1998)). The analysis of the crystal structures of USF, E47, Max, MyoD, and Pho4 (Ellenberger et al. (1994); Ferre-D'Amare et al. (1994); Ma et al. (1994); Shimizu et al. (1997); Fuji et al. (2000)) have shown that Glu-319 is critical because it contacts the first CA in the E-box DNA binding motif (CANNTG). Site-directed mutagenesis experiments with Pho4, in which other residues (Gln, Asp, and Leu) were substituted for Glu-13, demonstrated that the substitution abolished DNA binding (Fisher and Goding (1992)). Meanwhile, the role of Arg-16 is to fix and stabilize the position of the critical Glu-13; therefore, it plays an indirect role in DNA binding (Ellenberger et al. (1994); Shimizu et al. (1997); Fuji et al. (2000)).

[0259] The E-box binding bHLHs can be categorized further into subgroups based on the type of E-box recognized. Crystal structures show that the type of E-box binding preferences are established by residues in the basic region, with the best understood case being that of the G-box binders (Ellenberger et al. (1994); Ferre-D'Amare et al. (1994); Shimizu et al. (1997)). Toledo-Ortiz et al. (2003) have subdivided the Arabidopsis E-box binding bHLHs into (1) those predicted to bind G-boxes and (2) those predicted to recognize other types of E-boxes (non-G-box binders). There are three residues in the basic region of the bHLH proteins: His/Lys, Glu, and Arg at positions 315, 319, and 322 which constitute the classic G-box (CACGTG) recognition motif. Glu-319 is the key Glu involved in DNA binding, and analysis of the crystal structures of Max, Pho4, and USF indicates that Arg-322 confers specificity for CACGTG versus CAGCTG E-boxes by directly contacting the central G of the G-box. His-315 has an asymmetrical contact and also interacts with the G residue complementary to the first C in the G-box (Ferre-D'Amare et al. (1994); Shimizu et al. (1997); Fuji et al. (2000)).

[0260] Based on this analysis, G3086 is predicted to be an E-box binding protein. However, since it lacks a histidine or lysine at position 315, it is not predicted to be a G-box binding protein.

[0261] bHLH proteins are well known to dimerize, but the critical molecular determinants involved are not well defined (Shirakata et al. (1993); Littlewood and Evan (1998); Ciarapica et al. (2003)). On the other hand, the leucine residue at the position equivalent to residue 333 in G3086 has been shown to be structurally necessary for dimer formation in the mammalian Max protein (Brownlie et al. (1997)). This leucine is the only invariant residue in all bHLH proteins, consistent with a similar essential function in plant bHLH protein dimerization (arrow in FIG. 23G). Current information indicates that dimerization specificity is affected by multiple parameters, including hydrophobic interfaces, interactions between charged amino acids in the HLH region, and partner availability, but no complete explanation for partner recognition specificity has been documented (Ciarapica et al. (2003)). Thus, although empirically it seems logical that bHLH proteins most closely related in sequence in the HLH region are the most likely to form heterodimers, there has been no systematic investigation of this possibility to date.

[0262] In other eukaryotes, apart from the bHLH domain, additional functional domains have been identified in the bHLH proteins. These additional domains play roles in protein-protein interactions (e.g., PAS, WRPW, and COE in groups C, E, and F, respectively; Dang et al. (1992); Atchley and Fitch (1997); Ledent and Vervoort (2001)) and in bHLH dimerization specificity (e.g., the zipper domain, part of group B). G3086 does not appear to contain any of these functional domains apart from two nuclear localization signal (NLS) motifs. One NLS motif appears to be a simple localization signal, while the other has a bipartite structure, based on the occurrence of lysine and arginine clusters.

[0263] An alignment of the full-length proteins for genes in the G3086 study group compared with a selection of other proteins from the HLH/MYC family, and a phylogenetic tree based on that alignment is shown in FIG. 22.

[0264] Abiotic stress related phenotypes. G3086 was initially included as a candidate for the drought program based on the enhanced tolerance to salt and heat exhibited by overexpression lines. 35S::G3086 lines were subsequently tested in a soil drought assay. Lines for this gene showed improved drought resistance compared to wild-type in terms of both their appearance at the end of a drought treatment and survivability to drought treatment compared to controls following re-watering.

[0265] Effects on flowering time. In addition to the enhanced tolerance to abiotic stress, overexpression lines for G3086 or G592 show a very marked acceleration in the onset of flowering. Reflecting this rapid progression through the life cycle, overexpression lines for either gene tend to have a rather spindly appearance and reduced size compared to controls.

[0266] Tables 8-17 shows a number of polypeptides of the invention and include the amino acid residue coordinates for the conserved domains, the conserved domain sequences of the respective polypeptides, (sixth column); the identity in percentage terms to the conserved domain of the lead Arabidopsis sequence (the first transcription factor listed in each table), and whether the given sequence in each row was shown to confer increased biomass and yield or stress tolerance in plants (+) or has thus far not been shown to confer stress tolerance (−) for each given promoter::gene combination in our experiments. Percentage identities to the sequences listed in Tables 8-17 were determined using BLASTP analysis with defaults of wordlength (W) of 3, an expectation (E) of 10, and the BLOSUM62 scoring matrix Henikoff & Henikoff (1989) Proc. Natl. Acad. Sci. USA 89:10915).

TABLE 8

Conserved domains of G481 and closely related sequences

| | | | | % ID to | |
|---|---|---|---|---|---|
| | Species/GID | | | CCAAT-box | |
| Polypeptide | No., Accession | Domain | | binding | Abiotic |
| SEQ ID | No., or | Amino Acid | | conserved | Stress |
| NO: | Identifier | Coordinates | B Domain | domain of G481 | Tolerance |
| 2 | At/G481 | 20-110 | REQDRYLPIANISRIMKKALPPNGKI | 100% | + |
| | | | GKDAKDTVQECVSEFISFITSEASD | | |
| | | | KCQKEKRKTVNGDDLLWAMATLG | | |
| | | | FEDYLEPLKIYLARYRE | | |
| 4 | At/G3470 | 27-117 | REQDRYLPIANISPIMKKALPPNGKI | 93% | + |
| | | | AKDAKDTMQECVSEFISFITSEASE | | |
| | | | KCQKEKRKTINGDDLLWAMATLG | | |
| | | | FEDYIEPLKVYLARYRE | | |
| 6 | At/G3471 | 26-116 | REQDRYLPIANISRIMKKALPPNGKI | 93% | + |
| | | | AKDAKDTMQECVSEFISFITSEASE | | |
| | | | KCQKBKRKTINGDDLLWAMATLG | | |
| | | | FEDYIEPLKVYLARYRE | | |
| 8 | Zm/G3876 | 30-120 | REQDRFLPIANISRIMKKAIPANGKI | 87% | + |
| | | | AKDAKETVQECVSEFISFITSEASDK | | |
| | | | CQREKRKTINGDDLLWAMATLGFE | | |
| | | | DYIEPLKVYLQKYRE | | |
| 10 | At/G3394 | 38-127 | RQDRFLPIANISRIMKKAIPANGKIA | 87% | − |
| | | | KDAKETVQECVSEFISFITSEASDKC | | |
| | | | QREKRKTINGDDLLWAMATLGFED | | |
| | | | YIEPLKVYLQKYRE | | |
| 12 | Zm/G3434 | 18-108 | REQDRFLPIANISRIMKKAVPANGKI | 85% | + |
| | | | AKDAKETLQECVSEFISFVTSEASD | | |
| | | | KCQKEKRKTINGDDLLWAMATLG | | |
| | | | FEEYVEPLKIYLQKYKE | | |
| 14 | At/G1364 | 29-119 | REQDRFLPIANISRIMKRGLPANGKI | 85% | + |
| | | | AKDAKEIVQECVSEFISFVTSEASD | | |
| | | | KCQREKRKTINGDDLLWAMATLGF | | |
| | | | EDYMEPLKVYLMRYRE | | |
| 16 | Gm/G3475 | 23-113 | REQDRFLPIANVSRIMKKALPANAK | 84% | + |
| | | | ISKDAKETVQECVSEFISFITGEASD | | |
| | | | KCQREKRKTINGDDLLWAMTTLGF | | |
| | | | EDYVEPLKGYLQRFRE | | |
| 18 | At/G485 | 20-110 | REQDRFLPIANVSRIMKKALPANAK | 84% | + |
| | | | ISKDAKETVQECVSEFISFITGEASD | | |
| | | | KCQRFKRKTINGDDLLWAMTTLGF | | |
| | | | EDYVEPLKVYLQKYRE | | |
| 20 | Gm/G3476 | 26-116 | REQDRFLPIANVSRIMKKALPANAK | 84% | + |
| | | | ISKDAKETVQECVSEFISFITGEASD | | |
| | | | KCQREKRKTINGDDLLWAMTTLGF | | |
| | | | EEYVEPLKIYLQRFRE | | |
| 22 | At/G2345 | 28-118 | REQDRFLPIANISRIMKRGLPLNGKI | 84% | + |
| | | | AKDAKETMQECVSEFISFVTSEASD | | |
| | | | KCQREKRKTINGDDLLWAMATLGF | | |
| | | | EDYIDPLKVYLMRYRE | | |
| 24 | Gm/G3474 | 25-115 | REQDRFLPIANVSRIMKKALPANAK | 84% | − |
| | | | ISKEAKETVQECVSEFISFITGEASD | | |
| | | | KCQKEKRKTINGDDLLWAMTTLGF | | |
| | | | EDYVDPLKIYLHKYRE | | |
| 26 | Gm/G3478 | 23-113 | REQDRFLPIANVSRIMKKALPANAK | 84% | − |
| | | | ISKDAKETVQECVSEFISFITGEASD | | |
| | | | KCQREKRKTINGDDLLWAMTTLGF | | |
| | | | EDYVEPLKGYLQRFRE | | |
| 28 | At/G482 | 26-116 | REQDRFLPIANVSRIMKKALPANAK | 83% | + |
| | | | ISKDAKETMQECVSEFISFVTGEAS | | |
| | | | DKGQKEKRKTINGDDLLWAMTTL | | |
| | | | GFEDYVEPLKVYLQRFRE | | |
| 30 | Zm/G3435 | 22-112 | REQDRFLPIANYSRIMKKALPANAK | 83% | + |
| | | | ISKDAKETVQECVSEFISFITGEASD | | |
| | | | KCQREKRKTINGDDLLWAMTTLGF | | |
| | | | EDYVEPLKHYLHKFRE | | |
| 32 | Gm/G3472 | 25-115 | REQDRFLPIANVSRIMKKALPANAK | 83% | + |
| | | | ISKEAKETVQECVSEFISFITGEASD | | |
| | | | KGQKEKRKTINGDDLLWAMTTLGF | | |
| | | | EEYVEPLKVYLHKYRE | | |
| 34 | Zm/G3436 | 20-110 | REQDRFLPIANVSRIMKKALPANAK | 83% | + |
| | | | ISKDAKETVQECVSEFISFITGEASD | | |
| | | | KCQREKRKTINGDDLLWAMTTLGF | | |
| | | | EDYVEPLKLYLHKFRE | | |
| 36 | Os/G3397 | 23-113 | REQDRFLPIANVSRIMKKALPANAK | 82% | + |
| | | | ISKDAKETVQECVSEFISFITGEASD | | |
| | | | KCQREKRKTINGDDLLWAMTTLGF | | |
| | | | EDYVDPLKHYLHKFRE | | |
| 38 | Os/G3395 | 19-109 | REQDRFLPIANSRIMKKAVPANGKI | 82% | + |
| | | | AKDAKETLQECVSEFISFVTSEASD | | |
| | | | KCQKEKRKTINGEDLLFAMGTLGF | | |
| | | | EEYVDPLKIYLHKYRE | | |
| 40 | Os/G3398 | 20-110 | REQDRFLPIANVSRIMKRALPANAK | 81% | + |
| | | | ISKDAKETVQECVSEFISFITGEASD | | |
| | | | KCQREKRKTINGDDLLWMATTLGF | | |
| | | | EDYIDPLKLYLHKFRE | | |
| 42 | Os/G3396 | 20-111 | KEQDRFLPIANIGRIMRRAVPENGKI | 78% | + |
| | | | AKDSKESVQECVSEFISFITSEASDK | | |
| | | | CLKEKRKTINGDDLIWSMGTLGFE | | |
| | | | DYVEPLKLYLRLYRE | | |
| 58 | Os/G3429 | 37-125 | TNAELPMANLVRLIKKVLPGKAKI | 43% | + |
| | | | GGAAKGLTHDCAVEFVGFVGDEAS | | |
| | | | EKAKAEHRRTVAPEDYLGSFGDLG | | |
| | | | FDRYVDPMDAYIHGYRE | | |

TABLE 9

Conserved domains of G682 and closely related sequences

| | | | | % ID to | | Altered | | |
|---|---|---|---|---|---|---|---|---|
| | Species/ | | | MYB- | | C/N | | Water |
| | GID No., | | | related | | Sensing | | deprivation |
| SEQ | Accession | Domain in | | conserved | | and/or | | or osmotic |
| ID | No., or | Amino Acid | MYB-related | domain of | Salt Stress | tolerance | Cold | stress |
| NO: | Identifier | Coordinates | Domain | G682 | Tolerance | to low N₂ | Tolerance | tolerance |
| 60 | At/G682 | 33-77 | VNMSQEEEDLVS | 100% | + | + | + | + |
| | | | RMHKLVGDRWE | | | | | |
| | | | LIAGRIPGRTAGE | | | | | |
| | | | IERFWVMKN | | | | | |
| 62 | At/G226 | 38-82 | ISMTEQEEDLISR | 80% | − | + | + | + |
| | | | MYRLVGNRWDL | | | | | |
| | | | IAGRVVGRKANE | | | | | |
| | | | IERYWIMRN | | | | | |
| 64 | At/G2718 | 32-76 | IAMAQEEEDLICR | 80% | − | + | − | + |
| | | | MYKLVGERWDL | | | | | |
| | | | IAGRIPGRTAEEIE | | | | | |
| | | | RFWVMKN | | | | | |
| 66 | Os/G3393 | 31-75 | VHFTEEEEDLVF | 71% | − | + | + | + |
| | | | RMHRLVGNRWE | | | | | |
| | | | LIAGRIPGRTAKE | | | | | |
| | | | VEMFWAVKH | | | | | |
| 68 | Zm/G3431 | 31-75 | VDFTEAEEDLVS | 70% | − | + | + | + |
| | | | RMHRLVGNRWE | | | | | |
| | | | IIAGRIPGRTAEE | | | | | |
| | | | VEMFWSKKY | | | | | |
| 70 | Zm/G3444 | 31-75 | VDFTEAEEDLVS | 70% | − | + | − | + |
| | | | RMHRLVGNRWE | | | | | |
| | | | IIAGRIPGRTAEE | | | | | |
| | | | VEMFWSKKY | | | | | |
| 72 | Os/G3392 | 32-76 | VHFTEEEEDIVFR | 68% | + | + | + | − |
| | | | MHRLVGNRWELI | | | | | |
| | | | AGRIPGRTAEEV | | | | | |
| | | | EKFWAIKH | | | | | |
| 74 | Gm/G3450 | 20-64 | IHMSEQEEDLIRR | /68% | + | + | + | + |
| | | | MYKLVGDKWNL | | | | | |
| | | | IAGRIPGRKAEEI | | | | | |
| | | | ERFWIMRH | | | | | |
| 76 | At/G1816 | 30-74 | INMTEQEEDLIFR | 64% | − | + | − | + |
| | | | MYRLVGDRWDL | | | | | |
| | | | IAGRVPGRQPEEI | | | | | |
| | | | ERYWIMRN | | | | | |
| 78 | Gm/G3449 | 26-70 | VEFSEDEETLIIR | 63% | − | + | + | − |
| | | | MYKLVGERWSLI | | | | | |
| | | | AGRIPGRTAEEIE | | | | | |
| | | | KYWTSRF | | | | | |
| 80 | Gm/G3448 | 26-70 | VEFSEDEETLIIR | 61% | − | + | + | + (1 line |
| | | | MYKLVGERWSII | | | | | only) |
| | | | AGRIPGRTAEEIE | | | | | |
| | | | KYWTSRF | | | | | |
| 82 | Gm/G3446 | 26-70 | VEFSEAEEILIAM | 56% | − | − | − | + (1 line |
| | | | VYNLVGERWSLI | | | | | only) |
| | | | AGRIPGRTAEEIE | | | | | |
| | | | KYWTSRF | | | | | |
| 84 | Gm/G3445 | 25-69 | VEFSEAEEILIAM | 56% | − | − | − | − |
| | | | VYNLVGERWSLI | | | | | |
| | | | AGRIPGRTAEEIE | | | | | |
| | | | KYWTSRF | | | | | |

TABLE 10

Conserved domains of G867 and closely related sequences

| | | AP2 and B3 | | % ID to | | | |
|---|---|---|---|---|---|---|---|
| SEQ | | Domains in | | G867 | | % ID to | Abiotic |
| ID | Species/ | AA | | AP2 | | G867 B3 | Stress |
| NO: | GID No. | Coordinates | AP2 Domain | Domain | B3 Domain | Domain | Tolerance |
| 88 | At/G867 | AP2 | SSKYKGVVPQPN | 100% | LFEKAVTPSDVGKLN | 100% | + |
| | | 59-124 | GRWGAQIYEKHQ | | RLVIPKHHAEKHFPL | | |
| | | B3 | RVWLGTFNEEDE | | PSSNVSVKGVLLNFE | | |
| | | 187-272 | AARAYDVAVHRF | | DVNGKVWRFRYSY | | |
| | | | RRRDAVTNFKDV | | WNSSQSYVLTKGWS | | |
| | | | KMDEDE | | RFVKEKNLRAGDVV | | |
| 90 | At/G993 | AP2 | SSKYKGVVPQPN | 89% | LFEKTVTPSDVGKLN | 79% | + |
| | | 69-134 | GRWGAQIYEKHQ | | RLVIPKQHAEKHFPL | | |
| | | B3 | RVWLGTFNEEEE | | PAMTTAMGMNPSPT | | |
| | | 194-286 | AASSYDIAVRRFR | | KGVLINLEDRTGKV | | |
| | | | GRDAVTNFKSQV | | WRFRYSYWNSSQSY | | |
| | | | DGNDA | | VLTKGWSRFVKEKN | | |
| | | | | | LRAGDVV | | |
| 92 | At/G1930 | AP2 | SSRFKGVVPQPNG | 86% | LFEKTVTPSDVGKLN | 87% | + |
| | | 59-124 | RWGAQIYEKHQR | | RLVIPKHQAEKHFPL | | |
| | | B3 | VWLGTFNEEDEA | | PLGNNNVSVKGMLL | | |
| | | 182-269 | ARAYDVAAHRFR | | NFEDVNGKVWRFRY | | |
| | | | GRDAVTNFKDTTF | | SYWNSSQSYVLTKG | | |
| | | | EEEV | | WSRFVKEKRLCAGD | | |
| | | | | | LI | | |
| 94 | Os/G3391 | AP2 | SSKFKGVYPQPNG | 84% | LFDKTVTPSDVGKLN | 83% | + |
| | | 79-145 | RWGAQIYERHQR | | RLVIPKQHAEKHFPL | | |
| | | B3 | VWLGTFAGEDDA | | QLPSAGGESKGVLLN | | |
| | | 215-302 | ARAYDVAAQRFR | | FEDAAGKVWRFRYS | | |
| | | | GRDAVTNFRPLAE | | YWNSSQSYVLTKGW | | |
| | | | ADPDA | | SRFVKEKGLHADGK | | |
| | | | | | L | | |
| 96 | Gm/G3455 | AP2 | SSKYKGVVPQPN | 83% | LFQKAVTPSDVGKLN | 81% | + |
| | | 74-139 | GRWGSQIYEKHQ | | RLVIPKQHAEKHFPL | | |
| | | B3 | RVWLGTFNEEDE | | QSAANGVSATATAA | | |
| | | 204-296 | AARAYDVAVQRF | | KGVLLNFEDVGGKV | | |
| | | | RGKDAVTNFKPLS | | WRFRYSYWNSSQSY | | |
| | | | GTDDD | | VLTKGWSRFVKEKN | | |
| | | | | | LKAGDTV | | |
| 98 | Gm/G3452 | AP2 | SSKYKGVVPQPN | 83% | LFEKTVTPSDVGKLN | 78% | + |
| | | 51-116 | GRWGAQIYEKHQ | | RLVIPKQHAEKHFPL | | |
| | | B3 | RVWLGTFNEEDE | | SGSGDESSPCVAGAS | | |
| | | 171-266 | AARAYDIAALRFR | | AAKGMLLNFEDVGG | | |
| | | | GPDAVTNFKPPAA | | KVWRFRYSYWNSSQ | | |
| | | | SDDA | | SYVLTKGWSRFVKE | | |
| | | | | | KNLRAGDAV | | |
| 100 | Gm/G3453 | AP2 | SSKYKGVVPQPN | 83% | LVEKTVTPSDVGKLN | 77% | + |
| | | 57-122, | GRWGAQIYEKHQ | | RLVIPKQHAEKRFPL | | |
| | | B3 | RVWLGTFNEEDE | | SGSGGGALPCMAAA | | |
| | | 177-272 | AVRAYDIVAHRFR | | AGAKGMLLNFEDVG | | |
| | | | GRDAVTNFKPLA | | GKVWRFRYSYWNSS | | |
| | | | GADDA | | QSYVLTKGWSRFVK | | |
| | | | | | EKNLRAGDAV | | |
| 102 | Zm/G3432 | AP2 | SSRYKGVVPQPNG | 82% | LFDKTVTPSDVGKLN | 82% | + |
| | | 75-141 | RWGAQIYERHQR | | RLVIPKQHAEKHFPL | | |
| | | B3 | VWLGTFAGEADA | | QLPSAGGESKGVLLN | | |
| | | 212-299 | ARAYDVAAQRFR | | LEDAAGKVWRFRYS | | |
| | | | GRDAVTNFRPLA | | YWNSSQSYVLTKGW | | |
| | | | DADPDA | | SRFVKEKGLQAGDV | | |
| | | | | | V | | |
| 104 | Os/G3389 | AP2 | SSRYKGVVPQPNG | 82% | LFEKAVTPSDVGKLN | 78% | + |
| | | 64-129 | RWGAQIYERHAR | | RLVVPKQQAERHFPF | | |
| | | B3 | VWLGTFPDEEAA | | PLRRHSSDAAGKGVL | | |
| | | 177-266 | ARAYDVAALRFR | | LNFEDGDGKVWRFR | | |
| | | | GRDAVTNRAPAA | | YSYWNSSQSYVLTK | | |
| | | | EGASA | | GWSRFVREKGLRPG | | |
| | | | | | DTV | | |
| 106 | At/G9 | AP2 | SSKYKGVVPQPN | 81% | LFEKAVTPSDVGKLN | 91% | + |
| | | 62-127 | GRWGAQIYEKHQ | | RLVIPKQHAEKHFPL | | |
| | | B3 | RVWLGTFNEQEE | | PSPSPAVTKGVLINFE | | |
| | | 187-273 | AARSYDIAACRFR | | DVNGKVWRFRYSY | | |
| | | | GRDAVVNFKNVL | | WNSSQSYVLTKGWS | | |
| | | | EDGDL | | RFVKEKNLRAGDVV | | |
| 108 | Gm/G3451 | AP2 | SSKYKGVVPQPN | 81% | LFEKAVTPSDVGKLN | 78% | + |
| | | 80-146 | GRWGAQIYEKHQ | | RLVIPKQHAEKHFPL | | |
| | | B3 | RVWLGTFNEEDE | | QSSNGVSATTIAAVT | | |
| | | 209-308 | AARAYDIAAQRFR | | ATPTAAKGVLLNFED | | |
| | | | GKDAVTNFKPLA | | VGGKVWRFRYSYW | | |
| | | | GADDDD | | NSSQSYVLTKGWSRF | | |
| | | | | | VKEKNLKAGDTV | | |
| 110 | Os/G3388 | AP2 | SSRYKGVVPQPNG | 78% | LFEKAVTPSDVGKLN | 76% | n/d |
| | | 66-131 | RWGAQIYERHAR | | RLVVPKQHAEKHFPL | | |
| | | B3 | VWLGTFPDEEAA | | RRAASSDSASAAATG | | |
| | | 181-274 | ARAYDVAALRYR | | KGVLLNFEDGEGKV | | |
| | | | GRDAATNFPGAA | | WRFRYSYWNSSQSY | | |
| | | | ASAAE | | VLTKGWSRFVREKG | | |
| | | | | | LRAGDTI | | |
| 112 | Os/G3390 | AP2 | SSKYKGVVPQPN | 77% | LFDKTVTPSDVGKLN | 70% | + |
| | | 66-131 | GRWGAQIYERHQ | | RLVIPKQHAEKHFPL | | |
| | | B3 | RVWLGTFTGEAE | | QLPPPTTTSSVAAAA | | |
| | | 192-294 | AARAYDVAAQRF | | DAAAGGGDCKGVLL | | |
| | | | RGRDAVTNFRPLA | | NFEDAAGKVWKFRY | | |
| | | | ESDPE | | SYWNSSQSYVLTKG | | |
| | | | | | WSRFVKEKGLHAGD | | |
| | | | | | AV | | |

TABLE 11

Conserved domains of G1073 and closely related sequences

| | | AT-hook | | | | | | |
|---|---|---|---|---|---|---|---|---|
| | | and Second | | | | | | |
| | | Conserved | | | | | | |
| | | Domains in | | | | % ID to | | |
| | | AA | | % ID to | | Second | | |
| SEQ | | Coordinates | | AT-hook | Second | Conserved | Water | |
| ID | | and Base | AT-hook | Domain | Conserved | Domain of | deprivation | Greater |
| NO: | GID No. | Coordinates | domain | of G1073 | Domain | G1073 | Tolerance | Biomass |
| 114 | At/G1073 | Polypeptide | RRPRGRPAG | 100% | VSTYATRRGC | 100% | + | + |
| | | coordinates | | | GVCIISGTGAV | | | |
| | | 63-71, | | | TNVTIRQPAAP | | | |
| | | 107-204 | | | AGGGVITLHGR | | | |
| | | | | | FDILSLTGTALP | | | |
| | | | | | PPAPPGAGGLT | | | |
| | | | | | VYLAGGQGQV | | | |
| | | | | | VGGNVAGSLIA | | | |
| | | | | | SGPVVLMAASF | | | |
| 116 | Os/G3406 | Polypeptide | RRPRGRPPG | 89% | VSTYARRRQR | 71% | * | − |
| | | coordinates: | | | GVCVLSGSGV | | | |
| | | 82-90, | | | VTNVTLRQPSA | | | |
| | | 126-222 | | | PAGAVVSLHG | | | |
| | | | | | RFEILSLSGSFL | | | |
| | | | | | PPPAPPGATSLT | | | |
| | | | | | IFLAGGQGQVV | | | |
| | | | | | GGNVVGALYA | | | |
| | | | | | AGPVIVIAASF | | | |
| 118 | Os/G3399 | Polypeptide | RRPRGRPPG | 89% | VAEYARRRGR | 71% | + | + |
| | | coordinates: | | | GVCVLSGGGA | | | |
| | | 99-107, | | | VVNVALRQPG | | | |
| | | 143-240 | | | ASPPGSMVATL | | | |
| | | | | | RGRFEILSLTGT | | | |
| | | | | | VLPPPAPPGAS | | | |
| | | | | | GLTVFLSGGQG | | | |
| | | | | | QVIGGSVVGPL | | | |
| | | | | | VAAGPVVLMA | | | |
| | | | | | AS | | | |
| 120 | At/G1067 | Polypeptide | KRPRGRPPG | 78% | VSTYARRRGR | 69% | + | − |
| | | coordinates: | | | GVSVLGGNGT | | | |
| | | 86-94, | | | VSNVTLRQPVT | | | |
| | | 130-235 | | | PGNGGGVSGG | | | |
| | | | | | GGVVTLHGRF | | | |
| | | | | | EILSLTGTVLPP | | | |
| | | | | | PAPPGAGGLSIF | | | |
| | | | | | LAGGQGQVVG | | | |
| | | | | | GSVVAPLIASA | | | |
| | | | | | PVILMAASF | 68% | * | + |
| 122 | Gm/G3459 | Polypeptide | RRPRGRPPG | 89% | VTAYARRRQR | | | |
| | | coordinates: | | | GICVLSGSGTV | | | |
| | | 76-84, | | | TNVSLRQPAAA | | | |
| | | 121-216 | | | GAVVTLHGRF | | | |
| | | | | | EILSLSGSFLPP | | | |
| | | | | | PAPPGATSLTIY | | | |
| | | | | | LAGGQGQVVG | | | |
| | | | | | GNVIGELTAAG | | | |
| | | | | | PVIVIAASF | | | |
| 124 | Os/G3400 | Polypeptide | RRPRGRPLG | 89% | VCEFARRRGR | 68% | + | + |
| | | coordinates: | | | GVSVLSGGGA | | | |
| | | 83-91, | | | VANVALRQPG | | | |
| | | 127-225 | | | ASPPGSLVATM | | | |
| | | | | | RGQFEILSLTGT | | | |
| | | | | | VLPPPAPPSAS | | | |
| | | | | | GLTVFLSGGQG | | | |
| | | | | | QVVGGSVAGQ | | | |
| | | | | | LLAAGPVFLMA | | | |
| | | | | | ASF | | | |
| 372 | At/G2789 | Polypeptide | RRPRGRPAG | 100% | LAVFARRRQR | 67% | * | − |
| | | coordinates: | | | GVCVLTGNGA | | | |
| | | 59-67; | | | VTNVTVRQPG | | | |
| | | 103-196 | | | GGVVSLHGRFE | | | |
| | | | | | ILSLSGSFLPPP | | | |
| | | | | | APPAASGLKVY | | | |
| | | | | | LAGGQGQVIG | | | |
| | | | | | GSVVGPLTASS | | | |
| | | | | | PVVVMAASF | | | |
| 126 | Gm/G3460 | Polypeptide | RRPRGRPSG | 89% | VTAYARRRQR | 67% | + | + |
| | | coordinates: | | | GICVLSGSGTV | | | |
| | | 74-82, | | | TNVSLRQPAAA | | | |
| | | 118-213 | | | GAVVRLHGRF | | | |
| | | | | | EILSLSGSFLPP | | | |
| | | | | | PAPPGATSLTIY | | | |
| | | | | | LAGGQGQVVG | | | |
| | | | | | GNVVGELTAA | | | |
| | | | | | GPVIVIAASF | | | |
| 128 | At/G1667 | Polypeptide | KRPRGRPA | 89% | LSDFARRKQRG | 66% | n/d | + |
| | | coordinates: | G | | LCILSANGCVT | | | |
| | | 53-61; | | | NVTLRQPASSG | | | |
| | | 97-192 | | | AIVTLHGRYEI | | | |
| | | | | | LSLLGSILPPPA | | | |
| | | | | | PLGITGLTIYLA | | | |
| | | | | | GPQGQVVGGG | | | |
| | | | | | VVGGLIASGPV | | | |
| | | | | | VLMAASF | | | |
| 130 | At/G2156 | Polypeptide | KRPRGRPPG | 78% | VTTYARRRGR | 65% | + | + |
| | | coordinates: | | | GVSILSGNGTV | | | |
| | | 72-80, | | | ANVSLRQPATT | | | |
| | | 116-220 | | | AAHGANGGTG | | | |
| | | | | | GVVALHGRFEI | | | |
| | | | | | LSLTGTVLPPP | | | |
| | | | | | APPGSGGLSIFL | | | |
| | | | | | SGVQGQVIGG | | | |
| | | | | | NVVAPLVASGP | | | |
| | | | | | VILMAASF | | | |
| 132 | Gm/G3456 | Polypeptide | RRPRGRPPG | 89% | VAQFARRRQR | 65% | + | + |
| | | coordinates: | | | GVSILSGSGTV | | | |
| | | 62-70, | | | VNVNLRQPTAP | | | |
| | | 106-201 | | | GAVMALHGRF | | | |
| | | | | | DILSLTGSFLPG | | | |
| | | | | | PSPPGATGLTIY | | | |
| | | | | | LAGGQGQIVG | | | |
| | | | | | GEVVGIPLVAA | | | |
| | | | | | GPVLVMAATF | | | |
| 134 | Os/G3407 | Polypeptide | RRPRGRPPG | 89% | LTAYARRRQR | 63% | * | + |
| | | coordinates: | | | GVCVLSAAGT | | | |
| | | 63-71, | | | VANVTLRQPQS | | | |
| | | 106-208 | | | AQPGPASPAVA | | | |
| | | | | | TLHGRFEILSLA | | | |
| | | | | | GSFLPPPAPPG | | | |
| | | | | | ATSLAAFLAGG | | | |
| | | | | | QGQVVGGSVA | | | |
| | | | | | GALIAAGPVVV | | | |
| | | | | | VAASF | | | |
| 136 | Os/G3401 | Polypeptide | RRPRGRPPG | 89% | IAHFARRRQRG | 63% | + | + |
| | | coordinates: | | | VCVLSGAGTV | | | |
| | | 35-43, | | | TDVALRQPAAP | | | |
| | | 79-174 | | | SAVVALRGRFE | | | |
| | | | | | ILSLTGTFLPGP | | | |
| | | | | | APPGSTGLTVY | | | |
| | | | | | LAGGQGQVVG | | | |
| | | | | | GSVVGTLTAA | | | |
| | | | | | GPVMVIASTF | | | |
| 138 | At/G2153 | Polypeptide | RRPRGRPPG | 100% | LATFARRRQRG | 62% | + | + |
| | | coordinates: | | | ICILSGNGTVA | | | |
| | | 80-88, | | | NVTLRQPSTAA | | | |
| | | 124-227 | | | VAAAPGGAAV | | | |
| | | | | | LALQGRFEILSL | | | |
| | | | | | TGSFLPGPAPP | | | |
| | | | | | GSTGLTIYLAG | | | |
| | | | | | GQGQVVGGSV | | | |
| | | | | | VGPLMAAGPV | | | |
| | | | | | MLIAATF | | | |
| 140 | At/G1069 | Polypeptide | RRPRGRPPG | 89% | IAHFSRRRQRG | 62% | n/d | + |
| | | coordinates: | | | VCVLSGTGSVA | | | |
| | | 67-75, | | | NVTLRQAAAP | | | |
| | | 111-206 | | | GGVVSLQGRFE | | | |
| | | | ILSLTGAFLPGP | | | | | |
| | | | | | SPPGSTGLTVY | | | |
| | | | | | LAGVQGQVVG | | | |
| | | | | | GSVVGPLLAIG | | | |
| | | | | | SVMVIAATF | | | |
| 142 | Os/G3556 | Polypeptide | RRPRGRPPG | 89% | IAGFSRRRQRG | 62% | + | + |
| | | coordinates: | | | VSVLSGSGAVT | | | |
| | | 45-53; | | | NVTLRQPAGT | | | |
| | | 89-185 | | | GAAAVALRGR | | | |
| | | | | | FEILSMSGAFLP | | | |
| | | | | | APAPPGATGLA | | | |
| | | | | | VYLAGGQGQV | | | |
| | | | | | VGGSVMGELIA | | | |
| | | | | | SGPVMVIAATF | | | |
| 144 | At/G2157 | 88-96, | RRPRGRPPG | 89% | LNAFARRRGR | 60% | + | + |
| | | 132-228 | | | GVSVLSGSGLV | | | |
| | | | | | TNVTLRQPAAS | | | |
| | | | | | GGVVSLRGQFE | | | |
| | | | | | ILSMCGAFLPT | | | |
| | | | | | SGSPAAAAGLT | | | |
| | | | | | IYLAGAQGQV | | | |
| | | | | | VGGGVAGPLIA | | | |
| | | | | | SGPVIVIAATF | | | |
| 146 | Os/G3408 | 83-89, | KKRRGRPPG | 56% | LARFSSRRNLG | 44% | + | + |
| | | 91-247 | | | ICVLAGTGAVA | | | |
| | | | | | NVSLRHPSPGV | | | |
| | | | | | PGSAPAAIVFH | | | |
| | | | | | GRYEILSLSATF | | | |
| | | | | | LPPAMSSVAPQ | | | |
| | | | | | AAVAAAGLSIS | | | |
| | | | | | LAGPHGQIVGG | | | |
| | | | | | AVAGPLYAAT | | | |
| | | | | | TVVVVAAAF | | | |

TABLE 12

Conserved domains of G28 and closely related sequences

| | Species/GID | | | | |
|---|---|---|---|---|---|
| | No., | | | | |
| | Accession | AP2 Domain | | % ID to | |
| SEQ ID | No., or | Amino Acid | | conserved | Disease |
| NO: | Identifier | Coordinates | AP2 Domain | domain of G28 | Resistance |
| 148 | At/G28 | 144-208 | KGKHYRGVRQRPWGKFAAEIRDPA | 100% | + |
| | | | KNGARVWLGTFETAFDAALAYDR | | |
| | | | AAFRMRGSRALLNFPLRV | | |
| 150 | Bo/G3659 | 130-194 | KGKHYRGVRQRPWGKFAAEIRDPA | 100% | + |
| | | | KNGARVWLGTFETAEDAALAYDR | | |
| | | | AAFRMRGSRALLNFPLRV | | |
| 152 | At/G1006 | 113-177 | KAKHYRGVRQRPWGKFAAEIRDPA | 96% | + |
| | | | KNGARVWLGTFETAEDAALAYDIA | | |
| | | | AFRMRGSRALLNEPLRV | | |
| 154 | Gm/G3717 | 130-194 | KGKHYRGVRQRPWGKFAAEIRDPA | 98% | + |
| | | | KNGARVWLGTFETAEDAALAYDR | | |
| | | | AAYRMRGSRALLNFPLRV | | |
| 156 | Gm/G3718 | 139-203 | KGKHYRGVRQRPWGKFAAEIRDPA | 96% | + |
| | | | KNGARVWLGTFETAEDAALAYDR | | |
| | | | AAYRMRGSRALLNFPLRI | | |
| 158 | Bo/G3660 | 119-183 | KGKHYRGVRQRPWGKFAAEIRDPA | 96% | + |
| | | | KKGAREWLGTFETAEDAALAYDR | | |
| | | | AAFRMRGSRALLNFPLRV | | |
| 160 | Os/G3848 | 149-213 | RGKHYRGVRQRPWGKFAAEIRDPA | 93% | n/d |
| | | | KNGARVWLGTFDTAEDAALAYDR | | |
| | | | AAYRMRGSRALLNFPLRI | | |
| 162 | Zm/G3661 | 126-190 | RGKHYRGVRQRPWGKFAAEIRDPA | 90% | n/d |
| | | | RNGARVWLGTYDTAEDAALAYDR | | |
| | | | AAYRMRGSRALLNFPLRI | | |
| 164 | Ta/G3864 | 127-191 | RGKHFRGVRQRPWGKFAAEIRDPA | 89% | n/d |
| | | | KNGARVWLGTFDSAEDAAVAYDR | | |
| | | | AAYRMRGSRALLNFPLRI | | |
| 166 | Zm/G3856 | 140-204 | RGKHYRGVRQRPWGKFAAEIRDPA | 89% | n/d |
| | | | KNGARVWLGTYDSAEDAAVAYDR | | |
| | | | AAYRMRGSRALLNFPLRI | | |
| 168 | Os/G3430 | 145-209 | RGKHYRGVRQRPWGKFAAEIRDPA | 89% | + |
| | | | KNGARVWLGTFDSAEEAAVAYDR | | |
| | | | AAYRMRGSRALLNFPLRI | | |
| 170 | Le/G3841 | 102-166 | KGRHYRGVRQRPWGKFAAEIRDPA | 84% | n/d |
| | | | KNGARVWLGTYETAEEAAIAYDK | | |
| | | | AAYRMRGSKAHLNFPHRI | | |
| 172 | At/G22 | 88-152 | KGMQYRGVRRRPWGKFAAEIRDP | 82% | n/d |
| | | | KKNGARVWLGTYETPEDAAVAYD | | |
| | | | RAAFQLRGSKAKLNFPHLI | | |

TABLE 13

Conserved domains of G47 and closely related sequences

| | Species/ | | | | | |
|---|---|---|---|---|---|---|
| | GID No., | AP2 | | % ID to | | |
| SEQ | Accession | Domain | | conserved | Abiotic | Water |
| ID | No., or | Amino Acid | | domain of | Stress | deprivation |
| NO: | Identifier | Coordinates | AP2 Domain | G47 | Tolerance | Tolerance |
| 174 | At/G47 | 10-75 | SQSKYKGIRRRKWGKWVSE | 100% | + | + |
| | | | IRVPGTRDRLWLGSFSTAEG | | | |
| | | | AAVAHDVAFFCLHQPDSLES | | | |
| | | | LNFPHLL | | | |
| 176 | At/G2133 | 10-77 | DQSKYKGIRRRKWGKWVSE | 89% | + | + |
| | | | IRVPGTRQRLWLGSFSTAEG | | | |
| | | | AAVAHDVAFYCLHRPSSLD | | | |
| | | | DESFNFPHLL | | | |
| 184 | Os/G3649 | 15-87 | EMMRYRGVRRRRWGKWVS | 79% | + | + |
| | | | EIRVPGTRERLWLGSYATAE | | | |
| | | | AAAVAHDAAVCLLRLGGGR | | | |
| | | | RAAAGGGGGLNFPARA | | | |
| 182 | Os/G3644 | 52-122 | ERCRYRGVRRRRWGKWVS | 72% | +¹ | * |
| | | | EIRVPGTRERLWLGSYATPE | | | |
| | | | AAAVAHDTAVYFLRGGAGD | | | |
| | | | GGGGGATLNFPERA | | | |
| 178 | Gm/G3643 | 13-78 | TNNKLKGVRRRKWGKWVS | 68% | + | + |
| | | | EIRVPGTQERLWLGTYATPE | | | |
| | | | AAAVAHDVAVYCLSRPSSL | | | |
| | | | DKLNFPETL | | | |
| 180 | Zm/G3650 | 75-139 | RRCRYRGVRRRAWGKWVS | 65% | − | − |
| | | | EIRVPGTRERLWLGSYAAPE | | | |
| | | | AAAVAHDAAACLLRGCAGR | | | |
| | | | RLNFPGRAA | | | |

TABLE 14

Conserved domains of G1274 and closely related sequences

| | Species/ | | | | | |
|---|---|---|---|---|---|---|
| | GID No., | | | % ID to | | |
| SEQ | Accession | Domain | | conserved | Abiotic | |
| ID | No., or | Amino Acid | | domain of | Stress | Altered C/N |
| NO: | Identifier | Coordinates | WRKY Domain | G1274 | Tolerance | Sensing |
| 186 | At/G1274 | 110-166 | DDGFKWRKYGKKSVKNNINKRNYY | 100% | + | + |
| | | | KCSSEGCSVKKRVERDGDDAAYVIT | | | |
| | | | TYEGVHNH | | | |
| 188 | Gm/G3724 | 107-163 | DDGYKWRKYGKKSVKSSPNLRNYY | 84% | + | − |
| | | | KCSSGGCSVKKRVERDRDDYSYVIT | | | |
| | | | TYEGVHNH | | | |
| 190 | Zm/G3728 | 108-164 | DDGFKWRKYGKKAVKNSPNPRNYY | 82% | − | − |
| | | | RCSSEGCGVKKRVERDRDDPRYVIT | | | |
| | | | TYDGVHNH | | | |
| 192 | Zm/G3804 | 108-164 | DDGFKWRKYGKKAVKNSPNPRNYY | 82% | + | − |
| | | | RCSSEGCGVKKRVERDRDDPRYVIT | | | |
| | | | TYDGVHNH | | | |
| 194 | Gm/G3803 | 111-167 | DDGYKWRKYGKKTVKNNPNPRNYY | 80% | + | − |
| | | | KCSGEGCNVKKRVERDRDDSNYVLT | | | |
| | | | TYDGVHNH | | | |
| 196 | Zm/G3727 | 102-158 | DDGFKWRKYGKKAVKSSPNPRNYY | 80% | n/d | + |
| | | | RCSSEGCGVKKRVERDRDDPRYVIT | | | |
| | | | TYDGVHNH | | | |
| 198 | Os/G3721 | 96-152 | DDGFKWRKYGKKAVKNSPNPRNYY | 78% | + | − |
| | | | RCSTEGCNVKKRVERDREDHRYVIT | | | |
| | | | TYDGVHNH | | | |
| 200 | Zm/G3722 | 129-185 | DDGYKWRKYGKKSVKNSPNPRNYY | 78% | + | + |
| | | | RCSTEGCNVKKRVERDRDDPRYVVT | | | |
| | | | MYEGVHNH | | | |
| 202 | Os/G3726 | 135-191 | DDGYKWRKYGKKSVKNSPNPRNYY | 78% | + | − |
| | | | RCSTEGCNVKKRVERDKDDPSYVVT | | | |
| | | | TYEGTHNH | | | |
| 204 | Zm/G3720 | 135-191 | DDGYKWRKYGKKSVKNSPNPRNYY | 78% | n/d | n/d |
| | | | RCSTEGCNVKKRVERDKDDPSYVVT | | | |
| | | | TYEGMHNH | | | |
| 206 | Gm/G3723 | 112-168 | DDGYKWRKYGKKTVKSSPNPRNYY | 77% | − | − |
| | | | KCSGEGCDVKKRVERDRDDSNYVLT | | | |
| | | | TYDGVHNH | | | |
| 208 | At/G1275 | 113-169 | DDGFKWRKYGKKMVKNSPHPRNYY | 77% | + | − |
| | | | KCSVDGCPVKKRVERDRDDPSFVITT | | | |
| | | | YEGSHNH | | | |
| 210 | Os/G3730 | 107-163 | DDGFKWRKYGKKAVKSSPNPRNYY | 77% | n/d | − |
| | | | RCSAAGCGVKKRVERDGDDPRYVV | | | |
| | | | TTYDGVHNH | | | |
| 212 | Zm/G3719 | 98-154 | DDGFKWRKYGKKTVKSSPNPRNYY | 77% | n/d | − |
| | | | RCSAEGCGVKKRVERDSDDPRYVVT | | | |
| | | | TYDGVHNH | | | |
| 214 | Os/G3725 | 158-214 | DDGYKWRKYGKKSVKNSPNPRNYY | 75% | + | − |
| | | | RCSTEGGNYKKRVERDKNDPRYVVT | | | |
| | | | MYEGIHNH | | | |
| 216 | Os/G3729 | 137-193 | DDGYRWRKYGKKMVKNSPNPRNY | 75% | + | + |
| | | | YRCSSEGCRVKKRVERARDDARFVV | | | |
| | | | TTYDGVHNH | | | |

TABLE 15

Conserved domains of G1792 and closely related sequences

| | | AP2 and | | | | | | |
|---|---|---|---|---|---|---|---|---|
| | | EDLL | | % ID to | | % ID to | | |
| | | Domains in | | AP2 | | EDLL | Abiotic | |
| SEQ ID | GID No./ | aa | | Domain of | EDLL | Domain | stress | Disease |
| NO: | Species | Coordinates | AP2 domain | G1792 | Domain | of G1792 | tolerant | resistant |
| 222 | At/G1792 | 16-80; | KQARFRGVRRRPWGK | 100% | VFEFEYL | 100% | + | + |
| | | 117-132 | FAAEIRDPSRNGARL | | DDKVLEE | | | |
| | | | WLGTFETAEEAARAY | | LL | | | |
| | | | DRAAFNLRGHLAILNF | | | | | |
| | | | PNEY | | | | | |
| 224 | At/G1795 | 11-75; | EHGKYRGVRRRPWG | 69% | VFEFEYL | 93% | + | + |
| | | 104-119 | KYAAEIRDSRKHGER | | DDSVLEE | | | |
| | | | VWLGTFDTAEEAARA | | LL | | | |
| | | | YDQAAYSMRGQAAIL | | | | | |
| | | | NFPHEY | | | | | |
| 226 | At/G30 | 16-80; | EQGKYRGVRRRPWG | 70% | VFEFEYL | 87% | + | + |
| | | 100-115 | KYAAEIRDSRKHGER | | DDSVLDE | | | |
| | | | VWLGTFDTAEDAARA | | LL | | | |
| | | | YDRAAYSMRGKAAIL | | | | | |
| | | | NFPHEY | | | | | |
| 228 | Os/G3383 | 9-73; | TATKYRGVRRRPWGK | 79% | KIEFEYLD | 85% | + | n/d |
| | | 101-116 | FAAEIRDPERGGARV | | DKVLDDL | | | |
| | | | WLGTFDTAEEAARAY | | L | | | |
| | | | DRAAYAQRGAAAVL | | | | | |
| | | | NFPAAA | | | | | |
| 230 | At/G1791 | 10-74; | NEMKYRGVRKRPWG | 73% | VIEFEYLD | 81% | + | + |
| | | 108-123 | KYAAEIRDSARHGAR | | DSLLEELL | | | |
| | | | VWLGTFNTAEDAARA | | | | | |
| | | | YDRAAFGMRGQRAIL | | | | | |
| | | | NFPHEY | | | | | |
| 232 | Gm/G3519 | 13-77; | CEVRYRGIRRRPWGK | 78% | TFELEYLD | 80% | + | n/d |
| | | 128-143 | FAAEIRDPTRKGTRIW | | NKLLEEL | | | |
| | | | LGTFDTAEQAARAYD | | L | | | |
| | | | AAAFHFRGHRAILNFP | | | | | |
| | | | NEY | | | | | |
| 234 | Os/G3381 | 14-78; | LVAKYRGVRRRPWG | 76% | PIEFEYLD | 78% | + | + |
| | | 109-124 | KFAAEIRDSSRHGVRV | | DHVLQEM | | | |
| | | | WLGTFDTAEEAARAY | | L | | | |
| | | | DRSAYSMRGANAVLN | | | | | |
| | | | FPADA | | | | | |
| 236 | Os/G3737 | 8-72; | AASKYRGVRRRPWG | 76% | KVELVYL | 78% | + | n/d |
| | | 101-116 | KFAAEIRDPERGGSRV | | DDKVLDE | | | |
| | | | WLGTFDTAEEAARAY | | LL | | | |
| | | | DRAAFAMKGAMAVL | | | | | |
| | | | NFPGRT | | | | | |
| 238 | Os/G3515 | 11-75; | SSSSYRGVRKRPWGK | 75% | KVELECL | 78% | + | − |
| | | 116-131 | FAAEIRDPERGGARV | | DDKVLED | | | |
| | | | WLGTFDTAEEAARAY | | LL | | | |
| | | | DRAAFAMKGATAML | | | | | |
| | | | NFPGDH | | | | | |
| 240 | Zm/G3516 | 6-70; | KEGKYRGVRKRPWG | 74% | KVELECL | 78% | + | + |
| | | 107-122 | KFAAEIRDPERGGSRV | | DDRVLEE | | | |
| | | | WLGTFDTAEEAARAY | | LL | | | |
| | | | DRAAFAMKGATAVL | | | | | |
| | | | NFPASG | | | | | |
| 242 | Gm/G3520 | 14-78; | EEPRYRGVRRRPWGK | 80% | VIEFECLD | 75% | − | + |
| | | 109-124 | FAAEIRDPARHGARV | | DKLLEDL | | | |
| | | | WLGTFLTAEEAARAY | | L | | | |
| | | | DRAAYEMRGALAVL | | | | | |
| | | | NFPNEY | | | | | |
| 244 | Zm/G3517 | 13-77; | EPTKYRGVRRRPWGK | 72% | VIEFEYLD | 75% | + | + |
| | | 103-118 | YAAEIRDSSRHGVRIW | | DEVLQEM | | | |
| | | | LGTFDTAEEAARAYD | | L | | | |
| | | | RSANSMRGANAVLNF | | | | | |
| | | | PEDA | | | | | |
| 246 | Gm/G3518 | 13-77; | VEVRYRGIRRRPWGK | 78% | TFELEYFD | 73% | + | n/d |
| | | 135-150 | FAAEIRDPTRKGTRIW | | NKLLEEL | | | |
| | | | LGTFDTAEQAARAYD | | L | | | |
| | | | AAAFHFRGHRAILNFP | | | | | |
| | | | NEY | | | | | |
| 248 | Zm/G3739 | 13-77; | EPTKYRGVRRRPWGK | 72% | VIELEYLD | 68% | + | n/d |
| | | 107-122 | YAAEIRDSSRHGVRIW | | DEVLQEM | | | |
| | | | LGTFDTAEEAARAYD | | L | | | |
| | | | RSAYSMRGANAVLNF | | | | | |
| | | | PEDA | | | | | |
| 250 | Os/G3380 | 18-82; | ETTKYRGVRRRPSGK | 77% | VIELECLD | 62% | + | − |
| | | 103-118 | FAAEIRDSSRQSVRVW | | DQVLQEM | | | |
| | | | LGTFDTAEEAARAYD | | L | | | |
| | | | RAAYAMRGHLAVLN | | | | | |
| | | | FPAEA | | | | | |
| 252 | Zm/G3794 | 6-70; | EPTKYRGVRRRPSGKY | 73% | VIELECLD | 62% | + | n/d |
| | | 102-117 | AAEIRDSSRQSVRMW | | DQVLQEM | | | |
| | | | LGTFDTAEEAARAYD | | L | | | |
| | | | RAAYAMRGQIAVLNF | | | | | |
| | | | PAEA | | | | | |

TABLE 16

Conserved domains of G2999 and closely related sequences

| | | First and | | | | | |
|---|---|---|---|---|---|---|---|
| | | Second | | % ID to | | % ID to | |
| SEQ | | Domains in | | G2999 | | G2999 | Abiotic |
| ID | | AA | | First | | Second | Stress |
| No: | GID No. | Coordinates | ZF Domain | Domain | HD Domain | Domain | Tolerance |
| 256 | At/G2999 | 80-133; | ARYRECQKNHAAS | 100% | KKRFRTKFNEEQK | 100% | + |
| | | 198-261 | SGGHVVDGCGEFM | | EKMMEFAEKIGW | | |
| | | | SSGEEGTVESLLCA | | RMTKLEDDEVNR | | |
| | | | ACDCHRSFHRKEID | | FCREIKVKRQVFK | | |
| | | | | | VWMHNNKQAAK | | |
| | | | | | KKD | | |
| 258 | At/G2998 | 74-127, | VRYRECLKNHAAS | 81% | KKRFRTKFTTDQK | 72% | − |
| | | 240-303 | VGGSVHDGCGEFM | | ERMMDFAEKLGW | | |
| | | | PSGEEGTIEALRCA | | RMNKQDEEELKR | | |
| | | | ACDCHRNFHRKEM | | FCGEIGVKRQVFK | | |
| | | | D | | VWMHNNKNNAK | | |
| | | | | | KPP | | |
| 260 | At/G3000 | 58-111; | AKYRECQKNHAAS | 79% | KKRVRTKINEEQK | 65% | − |
| | | 181-244 | TGGHVVDGCCEFM | | EKMKEFAERLGW | | |
| | | | AGGEEGTLGALKC | | RMQKKDEEEIDKF | | |
| | | | AACNCHRSFHRKE | | CRMVNLRRQVFK | | |
| | | | VY | | VWMHNNKQAMK | | |
| | | | | | RNN | | |
| 262 | Os/G3690 | 161-213, | WRYRECLKNHAAR | 70% | KKRFRTKFTAEQK | 59% | + |
| | | 318-381 | MGAHVLDGCGEF | | ERMREFAHRVGW | | |
| | | | MSSPGDGAAALAC | | RIHKPDAAAVDAF | | |
| | | | AACGCHRSFHRREP | | CAQVGVSRRVLK | | |
| | | | A | | VWMHNNKHLAK | | |
| | | | | | TPP | | |
| 264 | At/G2997 | 47-100, | IRYRECLKNHAVNI | 69% | TKRFRTKFTAEQK | 61% | + |
| | | 157-220 | GGHAVDGCCEFMP | | EKMLAFAERLGW | | |
| | | | SGEDGTLDALKCA | | RIQKHDDVAVEQF | | |
| | | | ACGCHRNFHRKET | | CAETGVRRQVLKI | | |
| | | | E | | WMHNNKNSLGKK | | |
| | | | | | P | | |
| 266 | Zm/G3676 | 40-89; | ARYHECLRNHAAA | 69% | RKRFRTKFTPEQK | 57% | + |
| | | 162-255 | LGGHVVDGCGEFM | | EQMLAFAERLGW | | |
| | | | PGDGDSLKCAACG | | RLQKQDDALVQH | | |
| | | | CHRSFHRKDDA | | FCDQVGVRRQVF | | |
| | | | | | KVWMHNNKHTG | | |
| | | | | | RRQQ | | |
| 268 | Os/G3686 | 38-88; | CRYHECLRNHAAA | 68% | RRRSRTTFTREQK | 50% | + |
| | | 159-222 | SGGHVVDGCGEFM | | EQMLAFAERVGW | | |
| | | | PASTEEPLACAACG | | RIQRQEEATVEHF | | |
| | | | CHRSFHRRDPS | | CAQVGVRRQALK | | |
| | | | | | VWMHNNKHSFKQ | | |
| | | | | | KQ | | |
| 270 | At/G2996 | 73-126, | FRFRECLKNQAVNI | 67% | RKRHRTKFTAEQK | 54% | + |
| | | 191-254 | GGHAVDGCGEFMP | | ERMLALAERIGWR | | |
| | | | AGIEGTIDALKCAA | | IQRQDDEVIQRFC | | |
| | | | CGCHRNFHRKELP | | QETGVPRQVLKV | | |
| | | | | | WLHNNKHTLGKS | | |
| | | | | | P | | |
| 272 | At/G3001 | 62-113, | PHYYEGRKNHAAD | 63% | VKRLKTKFTAEQT | 48% | − |
| | | 179-242 | IGTTAYDGCGEFVS | | EKMRDYAEKLRW | | |
| | | | STGEEDSLNCAACG | | KVRPERQEEVEEF | | |
| | | | CHRNFHREELI | | CVEIGVNRKNFRI | | |
| | | | | | WMNNHKDKIIIDE | | |
| 274 | Os/G3685 | 43-95, | VRYHECLRNHAAA | 62% | RKRFRTKFTPEQK | 61% | + |
| | | 172-235 | MGGHVVDGCREF | | EQMLAFAERVGW | | |
| | | | MPMPGDAADALKC | | RMQKQDEALVEQ | | |
| | | | AACGCHRSFHRKD | | FCAQVGVRRQVF | | |
| | | | DG | | KVWMHNNKSSIG | | |
| | | | | | SSS | | |
| 276 | At/G2993 | 85-138, | IKYKECLKNHAAT | 62% | KKRFRTKFTQEQK | 58% | − |
| | | 222-285 | MGGNAIDGCGEFM | | EKMISFAERVGWK | | |
| | | | PSGEEGSIEALTCSV | | IQRQEESVVQQLC | | |
| | | | CNCHRNFHRRETE | | QEIGIRRRVLKVW | | |
| | | | | | MHNNKQNLSKKS | | |
| 278 | Zm/G3681 | 22-77; | PLYRECLKNHAASL | 62% | RKRFRTKFTAEQK | 54% | + |
| | | 208-271 | GGHAVDGCGEFMP | | QRMQELSERLGW | | |
| | | | SPGANPADPTSLKC | | RLQKRDEAVVDE | | |
| | | | AACGCHRNFHRRT | | WCRDMGVGKGVF | | |
| | | | V | | KVWMHNNKHNFL | | |
| | | | | | GGH | | |
| 280 | At/G2989 | 50-105; | VTYKECLKNHAAA | 61% | RKRFRTKFSSNQK | 62% | + |
| | | 192-255 | IGGHALDGCGEFM | | EKMHEFADRIGW | | |
| | | | PSPSSTPSDPTSLKC | | KIQKRDEDEVRDF | | |
| | | | AACGCHRNFHRRE | | CREIGVDKGVLKV | | |
| | | | TD | | WMHNNKNSFKFS | | |
| | | | | | G | | |
| 282 | At/G2991 | 54-109; | ATYKECLKNHAAG | 60% | RKRFRTKFSQYQK | 66% | − |
| | | 179-242 | IGGHALDGCGEFM | | EKMFEFSERVGW | | |
| | | | PSPSFNSNDPASLTC | | RMPKADDVVVKE | | |
| | | | AACGCHRNFHRRE | | FCREIGVDKSVFK | | |
| | | | ED | | VWMHNNKISGRS | | |
| | | | | | GA | | |
| 284 | At/G2990 | 54-109; | FTYKECLKNHAAA | 59% | RKRFRTKFSQFQK | 57% | + |
| | | 200-263 | LGGHALDGCGEFM | | EKMHEFAERVGW | | |
| | | | PSPSSISSDPTSLKC | | KMQKRDEDDVRD | | |
| | | | AACGCHRNFHRRD | | FCRQIGVDKSVLK | | |
| | | | PD | | VWMHNNLNTFNR | | |
| | | | | | RD | | |
| 286 | At/G2992 | 29-84, | VCYKECLKNHAAN | 59% | RKRTRTKFTPEQKI | 54% | + |
| | | 156-219 | LGGHALDGCGEFM | | KMRAFAEKAGWK | | |
| | | | PSPTATSTDPSSLRC | | INGCDEKSVREFC | | |
| | | | AACGCHRNFHRRD | | NEVGIERGVLKV | | |
| | | | PS | | WMHNNKYSLLNG | | |
| | | | | | K | | |
| 288 | At/G2995 | 3-58, | VLYNECLKNHAVS | 54% | KKHKRTKFTAEQ | 50% | + |
| | | 115-178 | LGGHALDGCGEFT | | KVKMRGFAERAG | | |
| | | | PKSTTILTDPPSLRC | | WKINGWDEKWVR | | |
| | | | DACGCHRNFHRRS | | EFCSEVGIERKVL | | |
| | | | PS | | KVWIHNNKYFNN | | |
| | | | | | GRS | | |
| 290 | At/G3002 | 5-53, | CVYRECMRNHAAK | 49% | QRRRKSKFTAFQR | 38% | + |
| | | 106-168 | LGSYAIDGCREYSQ | | EAMKDYAAKLG | | |
| | | | PSTGDLCVACGCH | | WTLKDKRALREEI | | |
| | | | RSYHRRIDV | | RVFCEGIGVTRYH | | |
| | | | | | FKTWVNNNKKFY | | |
| | | | | | H | | |

TABLE 17

Conserved domains of G3086 and closely related sequences

| | | | | | | |
|---|---|---|---|---|---|---|
| Species/ | | | | | | |
| | GID No., | | | % ID to | | |
| SEQ | Accession | Domain in | | conserved | Abiotic | |
| ID | No., or | Amino Acid | | domain of | Stress | Early |
| NO: | Identifier | Coordinates | bHLH Domain | G3086 | Tolerance | flowering |

| | | | | | | |
|---|---|---|---|---|---|---|
| 292 | At/G3086 | 307-365 | KRGCATHPRSIAERVRRTKIS | 100% | + | + |
| | | | ERMRKLQDLVPNMDTQTNT | | | |
| | | | ADMLDLAVQYIKDLQEQVK | | | |
| 294 | Gm/G3768 | 190-248 | KRGCATHPRSIAERVRRTKIS | 93% | + | + |
| | | | ERMRKLQDLVPNMDKQTNT | | | |
| | | | ADMLDLAVDYIKDLQKQVQ | | | |
| 296 | Gm/G3769 | 240-298 | KRGCATHPRSIAERVRRTKIS | 93% | + | + |
| | | | ERMRKLQDLVPNMDKQTNT | | | |
| | | | ADMLDLAVEYIKDLQNQVQ | | | |
| 298 | Gm/G3767 | 146-204 | KRGCATHPRSIAERVRRTKIS | 93% | + | + |
| | | | ERMRKLQDLVPNMDKQTNT | | | |
| | | | ADMLDLAVDYIKDLQKQVQ | | | |
| 300 | Os/G3744 | 71-129 | KRGCATHPRSIAERVRRTRIS | 89% | + | + |
| | | | ERIRKLQELVPNMDKQTNTA | | | |
| | | | DMLDLAVDYIKDLQKQVK | | | |
| 302 | Zm/G3755 | 97-155 | KRGCATHPRSIAERVRRTKIS | 89% | + | + |
| | | | ERIRKLQELVPNMDKQTNTS | | | |
| | | | DMLDLAVDYIKDLQKQVK | | | |
| 304 | Gm/G3766 | 35-93 | KRGCATHPRSIAERVRRTRIS | 88% | + | + |
| | | | ERMRKLQELVPHMDKQTNT | | | |
| | | | ADMLDLAVEYIKDLQKQFK | | | |
| 306 | At/G592 | 282-340 | KRGCATHPRSIAERVRRTRIS | 88% | −* | + |
| | | | ERMRKLQELVPNMDKQTNTS | | | |
| | | | DMLDLAVDYIKDLQRQYK | | | |
| 308 | Os/G3742 | 199-257 | KRGCATHPRSIAERVRRTRIS | 86% | n/d | n/d |
| | | | ERIRKLQELVPNMEKQTNTA | | | |
| | | | DMLDLAVDYIKELQKQVK | | | |
| 310 | Os/G3746 | 312-370 | KRGCATHPRSIAERERRTRIS | 79% | n/d | n/d |
| | | | KRLKKLQDLVPNMDKQTNTS | | | |
| | | | DMLDIAVTYIKELQGQVE | | | |
| 312 | Gm/G3771 | 84-142 | KRGCATHPRSIAERVRRTRIS | 79% | + | + |
| | | | DRIRKLQELVPNMDKQTNTA | | | |
| | | | DMLDEAVAYVKFLQKQIE | | | |
| 314 | Gm/G3765 | 147-205 | KRGFATHPRSIAERVRRTRISE | 79% | + | + |
| | | | RIRKLQELVPTMDKQTSTAE | | | |
| | | | MLDLALDYIKDLQKQFK | | | |
| 316 | At/G1134 | 187-245 | KRGCATHPRSIAERVRRTRIS | 77% | + | + |
| | | | DRIRKLQELVPNMDKQTNTA | | | |
| | | | DMLEEAVEYVKVLQRQIQ | | | |
| 318 | At/G2555 | 184-242 | KRGCATHPRSIAERVRRTRIS | 76% | + | + |
| | | | DRIRRLQELVPNMDKQTNTA | | | |
| | | | DMLEEAVEYVKALQSQIQ | | | |
| 320 | At/G2149 | 286-344 | KRGCATHPRSIAERERRTRIS | 74% | − | − |
| | | | GKLKKLQDLVPNMDKQTSYS | | | |
| | | | DMLDLAVQHIKGLQHQLQ | | | |
| 322 | At/G2766 | 234-292 | KRGFATHPRSIAERERRTRISG | 72% | + | + (1 line |
| | | | KLKKLQELVPNMDKQTSYAD | | | only) |
| | | | MLDLAVEHIKGLQHQVE | | | |
| 324 | Zm/G3760 | 243-300 | RRGQATDPHSIAERLRRERIA | 59% | + | + |
| | | | ERMKALQELVPNANKTDKAS | | | |
| | | | MLDEIVDYVKFLQLQVK | | | |
| 326 | Os/G3750 | 148-207 | RRGQATDPHSIAERLRRERIA | 57% | + | − |
| | | | ERMRALQELVPNTNKTDRAA | | | |

*data incomplete, soil drought assay not yet performed
¹two lines salt tolerant, but soil drought assay not yet performed
Abbreviations for Tables 8-17: At - Arabidopsis thaliana; Br - Brassica rapa subsp. Pekinensis, Bo- Brassica oleracea, Ca - Capsicum annuum; Gm - Glycine max; Ha - Helianthus annuus; Hv - Hordeum vulgare; La - Latuca sativa; Lc - Lotus corniculatus var. japonicus; Le - Lycopersicon esculentum; Mt - Medicago truncatula; Nt - Nicotiana tabacum; Os - Oryza sativa; St - Solanum tuberosum; Sb - Sorghum bicolor; Ta - Triticum aestivum; Ze - Zinnia elegans, Zm - Zea mays; + more tolerant than control plant in abiotic or disease assay n/d - assay not yet done

[0267] Orthologs and Paralogs

[0268] Homologous sequences as described above can comprise orthologous or paralogous sequences. Several different methods are known by those of skill in the art for identifying and defining these functionally homologous sequences. Three general methods for defining orthologs and paralogs are described; an ortholog or paralog, including equivalogs, may be identified by one or more of the methods described below.

[0269] Within a single plant species, gene duplication may cause two copies of a particular gene, giving rise to two or more genes with similar sequence and often similar function known as paralogs. A paralog is therefore a similar gene formed by duplication within the same species. Paralogs typically cluster together or in the same clade (a group of similar genes) when a gene family phylogeny is analyzed using programs such as CLUSTAL (Thompson et al. (1994); Higgins et al. (1996)). Groups of similar genes can also be identified with pair-wise BLAST analysis (Feng and Doolittle (1987)). For example, a clade of very similar MADS domain transcription factors from Arabidopsis all share a common function in flowering time (Ratcliffe et al. (2001)), and a group of very similar AP2 domain transcription factors from Arabidopsis are involved in tolerance of plants to freezing (Gilmour et al. (1998)). Analysis of groups of similar genes with similar function that fall within one clade can yield sub-sequences that are particular to the clade. These sub-sequences, known as consensus sequences, can not only be used to define the sequences within each clade, but define the functions of these genes; genes within a clade may contain paralogous sequences, or orthologous sequences that share the same function (see also, for example, Mount (2001))

[0270] Speciation, the production of new species from a parental species, can also give rise to two or more genes with similar sequence and similar function. These genes, termed orthologs, often have an identical function within their host plants and are often interchangeable between species without losing function. Because plants have common ancestors, many genes in any plant species will have a corresponding orthologous gene in another plant species. Once a phylogenic tree for a gene family of one species has been constructed using a program such as CLUSTAL (Thompson et al. (1994); Higgins et al. (1996)) potential orthologous sequences can be placed into the phylogenetic tree and their relationship to genes from the species of interest can be determined. Orthologous sequences can also be identified by a reciprocal BLAST strategy. Once an orthologous sequence has been identified, the function of the ortholog can be deduced from the identified function of the reference sequence.

[0271] Transcription factor gene sequences are conserved across diverse eukaryotic species lines (Goodrich et al. (1993); Lin et al. (1991); Sadowski et al. (1988)). Plants are no exception to this observation; diverse plant species possess transcription factors that have similar sequences and functions.

[0272] Orthologous genes from different organisms have highly conserved functions, and very often essentially identical functions (Lee et al. (2002); Remm et al. (2001)). Paralogous genes, which have diverged through gene duplication, may retain similar functions of the encoded proteins. In such cases, paralogs can be used interchangeably with respect to certain embodiments of the instant invention (for example, transgenic expression of a coding sequence). An example of such highly related paralogs is the CBF family, with three well-defined members in Arabidopsis and at least one ortholog in Brassica napus, all of which control pathways involved in both freezing and drought stress (Gilmour et al. (1998); Jaglo et al. (2001)).

[0273] Distinct Arabidopsis transcription factors, including G28 (found in U.S. Pat. No. 6,664,446), G482 (found in US Patent Application 20040045049), G867 (found in US Patent Application 20040098764), and G1073 (found in U.S. Pat. No. 6,717,034), have been shown to confer stress tolerance or increased biomass when the sequences are overexpressed. The polypeptides sequences belong to distinct clades of transcription factor polypeptides that include members from diverse species. In each case, a significant number of clade member sequences derived from both dicots and monocots have been shown to confer increased biomass or tolerance to stress when the sequences were overexpressed (unpublished data). These references may serve to represent the many studies that demonstrate that conserved transcription factor genes from diverse species are likely to function similarly (i.e., regulate similar target sequences and control the same traits), and that transcription factors may be transformed into diverse species to confer or improve traits.

[0274] As shown in Tables 8-17, transcription factors that are phylogenetically related to the transcription factors of the invention may have conserved domains that share at least 38% amino acid sequence identity, and have similar functions.

[0275] At the nucleotide level, the sequences of the invention will typically share at least about 30% or 40% nucleotide sequence identity, preferably at least about 50%, about 60%, about 70% or about 80% sequence identity, and more preferably about 85%, about 90%, about 95% or about 97% or more sequence identity to one or more of the listed full-length sequences, or to a listed sequence but excluding or outside of the region(s) encoding a known consensus sequence or consensus DNA-binding site, or outside of the region(s) encoding one or all conserved domains. The degeneracy of the genetic code enables major variations in the nucleotide sequence of a polynucleotide while maintaining the amino acid sequence of the encoded protein.

[0276] Percent identity can be determined electronically, e.g., by using the MEGALIGN program (DNASTAR, Inc. Madison, Wis.). The MEGALIGN program can create alignments between two or more sequences according to different methods, for example, the clustal method (see, for example, Higgins and Sharp (1988) The clustal algorithm groups sequences into clusters by examining the distances between all pairs. The clusters are aligned pairwise and then in groups. Other alignment algorithms or programs may be used, including FASTA, BLAST, or ENTREZ, FASTA and BLAST, and which may be used to calculate percent similarity. These are available as a part of the GCG sequence analysis package (University of Wisconsin, Madison, Wis.), and can be used with or without default settings. ENTREZ is available through the National Center for Biotechnology Information. In one embodiment, the percent identity of two sequences can be determined by the GCG program with a gap weight of 1, e.g., each amino acid gap is weighted as if it were a single amino acid or nucleotide mismatch between the two sequences (see U.S. Pat. No. 6,262,333).

[0277] Software for performing BLAST analyses is publicly available, e.g., through the National Center for Biotechnology Information (see internet website at http://www.ncbi.nlm.nih.gov/). This algorithm involves first identifying high scoring sequence pairs (HSPs) by identifying short words of length W in the query sequence, which either match or satisfy some positive-valued threshold score T when aligned with a word of the same length in a database sequence. T is referred to as the neighborhood word score threshold (Altschul (1993); Altschul et al. (1990)). These initial neighborhood word hits act as seeds for initiating searches to find longer HSPs containing them. The word hits are then extended in both directions along each sequence for as far as the cumulative alignment score can be increased. Cumulative scores are calculated using, for nucleotide sequences, the parameters M (reward score for a pair of matching residues; always >0) and N (penalty score for mismatching residues; always <0). For amino acid sequences, a scoring matrix is used to calculate the cumulative score. Extension of the word hits in each direction are halted when: the cumulative alignment score falls off by the quantity X from its maximum achieved value; the cumulative score goes to zero or below, due to the accumulation of one or more negative-scoring residue alignments; or the end of either sequence is reached. The BLAST algorithm parameters W, T, and X determine the sensitivity and speed of the alignment. The BLASTN program (for nucleotide sequences) uses as defaults a wordlength (W) of 11, an expectation (E) of 10, a cutoff of 100, M=5, N=−4, and a comparison of both strands. For amino acid sequences, the BLASTP program uses as defaults a wordlength (W) of 3, an expectation (E) of 10, and the BLOSUM62 scoring matrix (see Henikoff & Henikoff (1989) Proc. Natl. Acad. Sci. USA 89:10915). Unless otherwise indicated for comparisons of predicted polynucleotides, “sequence identity” refers to the % sequence identity generated from a tblastx using the NCBI version of the algorithm at the default settings using gapped alignments with the filter “off” (see, for example, internet website at http://www.ncbi.nlm.nih.gov/).

[0278] Other techniques for alignment are described by Doolittle (1996). Preferably, an alignment program that permits gaps in the sequence is utilized to align the sequences. The Smith-Waterman is one type of algorithm that permits gaps in sequence alignments (see Shpaer (1997). Also, the GAP program using the Needleman and Wunsch alignment method can be utilized to align sequences. An alternative search strategy uses MPSRCH software, which runs on a MASPAR computer. MPSRCH uses a Smith-Waterman algorithm to score sequences on a massively parallel computer. This approach improves ability to pick up distantly related matches, and is especially tolerant of small gaps and nucleotide sequence errors. Nucleic acid-encoded amino acid sequences can be used to search both protein and DNA databases.

[0279] The percentage similarity between two polypeptide sequences, e.g., sequence A and sequence B, is calculated by dividing the length of sequence A, minus the number of gap residues in sequence A, minus the number of gap residues in sequence B, into the sum of the residue matches between sequence A and sequence B, times one hundred. Gaps of low or of no similarity between the two amino acid sequences are not included in determining percentage similarity. Percent identity between polynucleotide sequences can also be counted or calculated by other methods known in the art, e.g., the Jotun Hein method (see, for example, Hein (1990)) Identity between sequences can also be determined by other methods known in the art, e.g., by varying hybridization conditions (see US Patent Application No. 20010010913).

[0280] Thus, the invention provides methods for identifying a sequence similar or paralogous or orthologous or homologous to one or more polynucleotides as noted herein, or one or more target polypeptides encoded by the polynucleotides, or otherwise noted herein and may include linking or associating a given plant phenotype or gene function with a sequence. In the methods, a sequence database is provided (locally or across an internet or intranet) and a query is made against the sequence database using the relevant sequences herein and associated plant phenotypes or gene functions.

[0281] In addition, one or more polynucleotide sequences or one or more polypeptides encoded by the polynucleotide sequences may be used to search against a BLOCKS (Bairoch et al. (1997)), PFAM, and other databases which contain previously identified and annotated motifs, sequences and gene functions. Methods that search for primary sequence patterns with secondary structure gap penalties (Smith et al. (1992)) as well as algorithms such as Basic Local Alignment Search Tool (BLAST; Altschul (1993); Altschul et al. (1990)), BLOCKS (Henikoff and Henikoff (1991)), Hidden Markov Models (HMM; Eddy (1996); Sonnhammer et al. (1997)), and the like, can be used to manipulate and analyze polynucleotide and polypeptide sequences encoded by polynucleotides. These databases, algorithms and other methods are well known in the art and are described in Ausubel et al. (1997), and in Meyers (1995).

[0282] A further method for identifying or confirming that specific homologous sequences control the same function is by comparison of the transcript profile(s) obtained upon overexpression or knockout of two or more related transcription factors. Since transcript profiles are diagnostic for specific cellular states, one skilled in the art will appreciate that genes that have a highly similar transcript profile (e.g., with greater than 50% regulated transcripts in common, or with greater than 70% regulated transcripts in common, or with greater than 90% regulated transcripts in common) will have highly similar functions. Fowler et al. (2002), have shown that three paralogous AP2 family genes (CBF1, CBF2 and CBF3), each of which is induced upon cold treatment, and each of which can condition improved freezing tolerance, have highly similar transcript profiles. Once a transcription factor has been shown to provide a specific function, its transcript profile becomes a diagnostic tool to determine whether paralogs or orthologs have the same function.

[0283] Furthermore, methods using manual alignment of sequences similar or homologous to one or more polynucleotide sequences or one or more polypeptides encoded by the polynucleotide sequences may be used to identify regions of similarity and AT-hook domains. Such manual methods are well-known of those of skill in the art and can include, for example, comparisons of tertiary structure between a polypeptide sequence encoded by a polynucleotide that comprises a known function and a polypeptide sequence encoded by a polynucleotide sequence that has a function not yet determined. Such examples of tertiary structure may comprise predicted alpha helices, beta-sheets, amphipathic helices, leucine zipper motifs, zinc finger motifs, proline-rich regions, cysteine repeat motifs, and the like.

[0284] Orthologs and paralogs of presently disclosed transcription factors may be cloned using compositions provided by the present invention according to methods well known in the art. cDNAs can be cloned using mRNA from a plant cell or tissue that expresses one of the present transcription factors. Appropriate mRNA sources may be identified by interrogating Northern blots with probes designed from the present transcription factor sequences, after which a library is prepared from the mRNA obtained from a positive cell or tissue. Transcription factor-encoding cDNA is then isolated using, for example, PCR, using primers designed from a presently disclosed transcription factor gene sequence, or by probing with a partial or complete cDNA or with one or more sets of degenerate probes based on the disclosed sequences. The cDNA library may be used to transform plant cells. Expression of the cDNAs of interest is detected using, for example, microarrays, Northern blots, quantitative PCR, or any other technique for monitoring changes in expression. Genomic clones may be isolated using similar techniques to those.

[0285] Examples of orthologs of the Arabidopsis polypeptide sequences and their functionally similar orthologs are listed in the Sequence Listing. In addition to the sequences in the Sequence Listing, the invention encompasses isolated nucleotide sequences that are phylogenetically and structurally similar to sequences listed in the Sequence Listing) and can function in a plant by increasing biomass, disease resistance and/or and abiotic stress tolerance when ectopically expressed in a plant. These polypeptide sequences represent transcription factors that show significant sequence similarity the polypeptides of the Sequence Listing particularly in their respective conserved domains, as identified in Tables 8-17.

[0286] Since a significant number of these sequences are phylogenetically and sequentially related to each other and have been shown to increase a plants biomass, disease resistance and/or abiotic stress tolerance, one skilled in the art would predict that other similar, phylogenetically related sequences falling within the present clades of transcription factors would also perform similar functions when ectopically expressed.

[0287] Identifying Polynucleotides or Nucleic Acids by Hybridization

[0288] Polynucleotides homologous to the sequences illustrated in the Sequence Listing and tables can be identified, e.g., by hybridization to each other under stringent or under highly stringent conditions. Single stranded polynucleotides hybridize when they associate based on a variety of well characterized physical-chemical forces, such as hydrogen bonding, solvent exclusion, base stacking and the like. The stringency of a hybridization reflects the degree of sequence identity of the nucleic acids involved, such that the higher the stringency, the more similar are the two polynucleotide strands. Stringency is influenced by a variety of factors, including temperature, salt concentration and composition, organic and non-organic additives, solvents, etc. present in both the hybridization and wash solutions and incubations (and number thereof), as described in more detail in the references cited below (e.g., Sambrook et al. (1989); Berger and Kimmel (1987); and Anderson and Young (1985)).

[0289] Encompassed by the invention are polynucleotide sequences that are capable of hybridizing to the claimed polynucleotide sequences, including any of the transcription factor polynucleotides within the Sequence Listing, and fragments thereof under various conditions of stringency (see, for example, Wahl and Berger (1987); and Kimmel (1987)). In addition to the nucleotide sequences listed in the Sequence Listing, full length cDNA, orthologs, and paralogs of the present nucleotide sequences may be identified and isolated using well-known methods. The cDNA libraries, orthologs, and paralogs of the present nucleotide sequences may be screened using hybridization methods to determine their utility as hybridization target or amplification probes.

[0290] With regard to hybridization, conditions that are highly stringent, and means for achieving them, are well known in the art. See, for example, Sambrook et al. (1989); Berger (1987), pages 467-469; and Anderson and Young (1985).

[0291] Stability of DNA duplexes is affected by such factors as base composition, length, and degree of base pair mismatch. Hybridization conditions may be adjusted to allow DNAs of different sequence relatedness to hybridize. The melting temperature (Tₘ) is defined as the temperature when 50% of the duplex molecules have dissociated into their constituent single strands. The melting temperature of a perfectly matched duplex, where the hybridization buffer contains formamide as a denaturing agent, may be estimated by the following equations:

[0292] (I) DNA-DNA:

Tₘ(° C.)=81.5+16.6(log [Na+])+0.41(% G+C)−0.62(% formamide)−500/L

[0293] (II) DNA-RNA:

Tₘ(° C.)=79.8+18.5(log [Na+])+0.58(% G+C)+0.12(% G+C)²−0.5(% formamide)−820/L

[0294] (III) RNA-RNA:

Tₘ(° C.)=79.8+18.5(log [Na+])+0.58(% G+C)+0.12(% G+C)²−0.35(% formamide)−820/L

where L is the length of the duplex formed, [Na+] is the molar concentration of the sodium ion in the hybridization or washing solution, and % G+C is the percentage of (guanine+cytosine) bases in the hybrid. For imperfectly matched hybrids, approximately 1° C. is required to reduce the melting temperature for each 1% mismatch.

[0295] Hybridization experiments are generally conducted in a buffer of pH between 6.8 to 7.4, although the rate of hybridization is nearly independent of pH at ionic strengths likely to be used in the hybridization buffer (Anderson and Young (1985)). In addition, one or more of the following may be used to reduce non-specific hybridization: sonicated salmon sperm DNA or another non-complementary DNA, bovine serum albumin, sodium pyrophosphate, sodium dodecylsulfate (SDS), polyvinyl-pyrrolidone, ficoll and Denhardt's solution. Dextran sulfate and polyethylene glycol 6000 act to exclude DNA from solution, thus raising the effective probe DNA concentration and the hybridization signal within a given unit of time. In some instances, conditions of even greater stringency may be desirable or required to reduce non-specific and/or background hybridization. These conditions may be created with the use of higher temperature, lower ionic strength and higher concentration of a denaturing agent such as formamide.

[0296] Stringency conditions can be adjusted to screen for moderately similar fragments such as homologous sequences from distantly related organisms, or to highly similar fragments such as genes that duplicate functional enzymes from closely related organisms. The stringency can be adjusted either during the hybridization step or in the post-hybridization washes. Salt concentration, formamide concentration, hybridization temperature and probe lengths are variables that can be used to alter stringency (as described by the formula above). As a general guidelines high stringency is typically performed at Tₘ−5° C. to Tₘ−20° C., moderate stringency at Tₘ−20° C. to Tₘ−35° C. and low stringency at Tₘ−35° C. to Tₘ−50° C. for duplex >150 base pairs. Hybridization may be performed at low to moderate stringency (25-50° C. below Tₘ), followed by post-hybridization washes at increasing stringencies. Maximum rates of hybridization in solution are determined empirically to occur at Tₘ−25° C. for DNA-DNA duplex and Tₘ−15° C. for RNA-DNA duplex. Optionally, the degree of dissociation may be assessed after each wash step to determine the need for subsequent, higher stringency wash steps.

[0297] High stringency conditions may be used to select for nucleic acid sequences with high degrees of identity to the disclosed sequences. An example of stringent hybridization conditions obtained in a filter-based method such as a Southern or Northern blot for hybridization of complementary nucleic acids that have more than 100 complementary residues is about 5° C. to 20° C. lower than the thermal melting point (Tₘ) for the specific sequence at a defined ionic strength and pH. Conditions used for hybridization may include about 0.02 M to about 0.15 M sodium chloride, about 0.5% to about 5% casein, about 0.02% SDS or about 0.1% N-laurylsarcosine, about 0.001 M to about 0.03 M sodium citrate, at hybridization temperatures between about 50° C. and about 70° C. More preferably, high stringency conditions are about 0.02 M sodium chloride, about 0.5% casein, about 0.02% SDS, about 0.001 M sodium citrate, at a temperature of about 50° C. Nucleic acid molecules that hybridize under stringent conditions will typically hybridize to a probe based on either the entire DNA molecule or selected portions, e.g., to a unique subsequence, of the DNA.

[0298] Stringent salt concentration will ordinarily be less than about 750 mM NaCl and 75 mM trisodium citrate. Increasingly stringent conditions may be obtained with less than about 500 mM NaCl and 50 mM trisodium citrate, to even greater stringency with less than about 250 mM NaCl and 25 mM trisodium citrate. Low stringency hybridization can be obtained in the absence of organic solvent, e.g., formamide, whereas high stringency hybridization may be obtained in the presence of at least about 35% formamide, and more preferably at least about 50% formamide. Stringent temperature conditions will ordinarily include temperatures of at least about 30° C., more preferably of at least about 37° C., and most preferably of at least about 42° C. with formamide present. Varying additional parameters, such as hybridization time, the concentration of detergent, e.g., sodium dodecyl sulfate (SDS) and ionic strength, are well known to those skilled in the art. Various levels of stringency are accomplished by combining these various conditions as needed.

[0299] The washing steps that follow hybridization may also vary in stringency; the post-hybridization wash steps primarily determine hybridization specificity, with the most critical factors being temperature and the ionic strength of the final wash solution. Wash stringency can be increased by decreasing salt concentration or by increasing temperature. Stringent salt concentration for the wash steps will preferably be less than about 30 mM NaCl and 3 mM trisodium citrate, and most preferably less than about 15 mM NaCl and 1.5 mM trisodium citrate.

[0300] Thus, hybridization and wash conditions that may be used to bind and remove polynucleotides with less than the desired homology to the nucleic acid sequences or their complements that encode the present transcription factors include, for example:

[0301] 6×SSC at 65° C.;

[0302] 50% formamide, 4×SSC at 42° C.; or

[0303] 0.5×SSC, 0.1% SDS at 65° C.;

[0304] with, for example, two wash steps of 10-30 minutes each. Useful variations on these conditions will be readily apparent to those skilled in the art.

[0305] A person of skill in the art would not expect substantial variation among polynucleotide species encompassed within the scope of the present invention because the highly stringent conditions set forth in the above formulae yield structurally similar polynucleotides.

[0306] If desired, one may employ wash steps of even greater stringency, including about 0.2×SSC, 0.1% SDS at 65° C. and washing twice, each wash step being about 30 minutes, or about 0.1×SSC, 0.1% SDS at 65° C. and washing twice for 30 minutes. The temperature for the wash solutions will ordinarily be at least about 25° C., and for greater stringency at least about 42° C. Hybridization stringency may be increased further by using the same conditions as in the hybridization steps, with the wash temperature raised about 3° C. to about 5° C., and stringency may be increased even further by using the same conditions except the wash temperature is raised about 6° C. to about 9° C. For identification of less closely related homologs, wash steps may be performed at a lower temperature, e.g., 50° C.

[0307] An example of a low stringency wash step employs a solution and conditions of at least 25° C. in 30 mM NaCl, 3 mM trisodium citrate, and 0.1% SDS over 30 minutes. Greater stringency may be obtained at 42° C. in 15 mM NaCl, with 1.5 mM trisodium citrate, and 0.1% SDS over 30 minutes. Even higher stringency wash conditions are obtained at 65° C.-68° C. in a solution of 15 mM NaCl, 1.5 mM trisodium citrate, and 0.1% SDS. Wash procedures will generally employ at least two final wash steps. Additional variations on these conditions will be readily apparent to those skilled in the art (see, for example, US Patent Application No. 20010010913).

[0308] Stringency conditions can be selected such that an oligonucleotide that is perfectly complementary to the coding oligonucleotide hybridizes to the coding oligonucleotide with at least about a 5-10× higher signal to noise ratio than the ratio for hybridization of the perfectly complementary oligonucleotide to a nucleic acid encoding a transcription factor known as of the filing date of the application. It may be desirable to select conditions for a particular assay such that a higher signal to noise ratio, that is, about 15× or more, is obtained. Accordingly, a subject nucleic acid will hybridize to a unique coding oligonucleotide with at least a 2× or greater signal to noise ratio as compared to hybridization of the coding oligonucleotide to a nucleic acid encoding known polypeptide. The particular signal will depend on the label used in the relevant assay, e.g., a fluorescent label, a colorimetric label, a radioactive label, or the like. Labeled hybridization or PCR probes for detecting related polynucleotide sequences may be produced by oligolabeling, nick translation, end-labeling, or PCR amplification using a labeled nucleotide.

[0309] Encompassed by the invention are polynucleotide sequences that are capable of hybridizing to the claimed polynucleotide sequences, including any of the transcription factor polynucleotides within the Sequence Listing, and fragments thereof under various conditions of stringency (see, for example, Wahl and Berger (1987), pages 399-407; and Kimmel (1987)). In addition to the nucleotide sequences in the Sequence Listing, fall length cDNA, orthologs, and paralogs of the present nucleotide sequences may be identified and isolated using well-known methods. The cDNA libraries, orthologs, and paralogs of the present nucleotide sequences may be screened using hybridization methods to determine their utility as hybridization target or amplification probes.

### EXAMPLES

[0310] It is to be understood that this invention is not limited to the particular devices, machines, materials and methods described. Although particular embodiments are described, equivalent embodiments may be used to practice the invention.

[0311] The invention, now being generally described, will be more readily understood by reference to the following examples, which are included merely for purposes of illustration of certain aspects and embodiments of the present invention and are not intended to limit the invention. It will be recognized by one of skill in the art that a transcription factor that is associated with a particular first trait may also be associated with at least one other, unrelated and inherent second trait which was not predicted by the first trait.

### Example I

### Project Types

[0312] A variety of constructs are being used to modulate the activity of lead transcription factors, and to test the activity of orthologs and paralogs in transgenic plant material. This platform provides the material for all subsequent analysis.

[0313] Transgenic lines from each particular transformation “project” are examined for morphological and physiological phenotypes. An individual project is defined as the analysis of lines for a particular construct or knockout (for example this might be 35S lines for a lead gene, 35S lines for a paralog or ortholog, lines for an RNAi construct, lines for a GAL4 fusion construct, lines in which expression is driven from a particular tissue specific promoter, etc.) In the current lead advancement program, four main areas of analysis were pursued, spanning a variety of different project types (e.g., promoter-gene combinations).

### (1) Overexpression/Tissue Specific/Conditional Expression

[0314] The promoters used in our experiments were selected in order to provide for a range of different expression patterns. Details of promoters being used, along with a characterization of the expression patterns that they produce are given in the Promoter Analysis (Example II).

[0315] Expression of a given TF from a particular promoter is achieved either by a direct-promoter fusion construct in which that TF is cloned directly behind the promoter of interest or by a two component system. Details of transformation vectors used in these studies are shown in the Vector and Cloning Information (Example III). A list of all constructs (PIDs) included in this report, indicating the promoter fragment that is being used to drive the transgene, along with the cloning vector backbone, is provided in the following Table. Compilations of the sequences of promoter fragments and the expressed transgene sequences within the PIDs are provided in the Sequence Listing.

TABLE 18
Sequences of promoter fragments and the expressed transgene sequences

| | | SEQ ID | | | | |
|---|---|---|---|---|---|---|
| | | NO: of | | | | |
| GID | PID | PID | Promoter | Project type | Promoter_ID | Vector |
| G9 | P167 | 421 | 35S | Direct promoter-fusion | N2 | pMEN20 |
| G9 | P7824 | 422 | opLexA | 2-components-supTfn (TF | N3 | P5480 |
| | | | | component of two-component | | |
| | | | | system) | | |
| G19 | P1 | 423 | 35S | Direct promoter-fusion | N2 | pMEN20 |
| G22 | P806 | 424 | 35S | Direct promoter-fusion | N2 | pMEN001 |
| G22 | P25649 | 425 | Prom-G22 | Promoter-reporter | N1146 | P21142 |
| G22 | P25648 | 426 | Prom-G22 | Promoter-reporter (YFP/LTI6b) | N1146 | P25755 |
| G28 | P21202 | 427 | 35S | Direct GR-fusion C-term | N2 | P21171 |
| G28 | P21277 | 428 | 35S | Direct GR-fusion HA C-term | N2 | P21172 |
| G28 | P21208 | 429 | 35S | Direct GR-fusion N-term | N2 | P21173 |
| G28 | P21283 | 430 | 35S | Direct GR-fusion HA N-term | N2 | P21174 |
| G28 | P21196 | 431 | 35S | GAL4 N-term | N2 | P21195 |
| G28 | P25444 | 432 | 35S | domain swap_1 | N2 | P21195 |
| G28 | P174 | 433 | 35S | Direct promoter-fusion | N2 | pMEN20 |
| G28 | P21143 | 434 | 35S | GAL4 C-term | N2 | P5425 |
| G28 | P25443 | 435 | 35S | deletion_2 | N2 | pMEN65 |
| G28 | P25678 | 436 | 35S | site-directed mutation_1 | N2 | pMEN65 |
| G28 | P25679 | 437 | 35S | site-directed mutation_2 | N2 | pMEN65 |
| G28 | P25680 | 438 | 35S | site-directed mutation_3 | N2 | pMEN65 |
| G28 | P25681 | 439 | 35S | site-directed mutation_4 | N2 | pMEN65 |
| G28 | P25682 | 440 | 35S | site-directed mutation_5 | N2 | pMEN65 |
| G28 | P25683 | 441 | 35S | site-directed mutation_6 | N2 | pMEN65 |
| G28 | P25684 | 442 | 35S | site-directed mutation_7 | N2 | pMEN65 |
| G28 | P25442 | 443 | 35S | deletion_1 | N2 | pMEN65 |
| G28 | P23541 | 444 | ARSK1 | Direct promoter-fusion | N1131 | pMEN65 |
| G28 | P23317 | 445 | ARSK1 | Direct promoter-fusion | N82 | pMEN65 |
| G28 | P23441 | 446 | CUT1 | Direct promoter-fusion | N19 | pMEN65 |
| G28 | P23543 | 447 | LTP1 | Direct promoter-fusion | N1135 | pMEN65 |
| G28 | P7826 | 448 | opLexA | 2-components-supTfn (TF | N3 | P5480 |
| | | | | component of two-component | | |
| | | | | system) | | |
| G28 | P25937 | 449 | opLexA | 2-components-supTfn-HA-C-term | N3 | P25461 |
| | | | | (TF component of two-component | | |
| | | | | system) | | |
| G28 | P26267 | 450 | opLexA | 2-components-supTfn-HA-N-term | N3 | P25976 |
| | | | | (TF component of two-component | | |
| | | | | system) | | |
| G28 | P21169 | 451 | Prom-G28 | Promoter-reporter | N517 | P21142 |
| G28 | P25712 | 452 | Prom-G28 | Promoter-reporter | N517 | P32122 |
| G28 | P25650 | 453 | Prom-G28 | Promoter-reporter (YFP/LTI6b) | N517 | P25755 |
| G28 | P23544 | 454 | RBCS3 | Direct promoter-fusion | N1136 | pMEN65 |
| G30 | P25086 | 455 | 35S | Direct GR-fusion C-term | N2 | P21171 |
| G30 | P25097 | 456 | 35S | Direct GR-fusion N-term | N2 | P21173 |
| G30 | P893 | 457 | 35S | Direct promoter-fusion | N2 | pMEN65 |
| G30 | P3852 | 458 | opLexA | 2-components-supTfn (TF | N3 | P5381 |
| | | | | component of two-component | | |
| | | | | system) | | |
| G30 | P25123 | 459 | Prom-G30 | Promoter-reporter | N1118 | P21142 |
| G47 | P25185 | 460 | 35S | Direct GR-fusion C-term | N2 | P21171 |
| G47 | P25187 | 461 | 35S | Direct GR-fusion N-term | N2 | P21173 |
| G47 | P25186 | 462 | 35S | GAL4 N-term | N2 | P21195 |
| G47 | P25184 | 463 | 35S | GAL4 C-term | N2 | P21378 |
| G47 | P25279 | 464 | 35S | Protein-GFP-C-fusion | N2 | P25799 |
| G47 | P894 | 465 | 35S | Direct promoter-fusion | N2 | pMEN65 |
| G47 | P25732 | 466 | 35S | site-directed mutation_1 | N2 | pMEN65 |
| G47 | P25733 | 467 | 35S | site-directed mutation_2 | N2 | pMEN65 |
| G47 | P25734 | 468 | 35S | site-directed mutation_3 | N2 | pMEN65 |
| G47 | P25735 | 469 | 35S | site-directed mutation_4 | N2 | pMEN65 |
| G47 | P25182 | 470 | 35S | domain swap_1 | N2 | pMEN65 |
| G47 | P3853 | 471 | opLexA | 2-components-supTfn (TF | N3 | P5381 |
| | | | | component of two-component | | |
| | | | | system) | | |
| G47 | P25195 | 472 | opLexA | 2-components-supTfn-TAP-C-term | N3 | P25420 |
| | | | | (TF component of two-component | | |
| | | | | system) | | |
| G47 | P25194 | 473 | opLexA | 2-components-supTfn-HA-C-term | N3 | P25461 |
| | | | | (TF component of two-component | | |
| | | | | system) | | |
| G47 | P26262 | 474 | opLexA | 2-components-supTfn-HA-N-term | N3 | P25976 |
| | | | | (TF component of two-component | | |
| | | | | system) | | |
| G47 | P25134 | 475 | Prom-G47 | Promoter-reporter | N1124 | P21142 |
| G47 | P25998 | 476 | Prom-G47 | Promoter-reporter (YFP/LTI6b) | N1124 | P25755 |
| G194 | P197 | 477 | 35S | Direct promoter-fusion | N2 | pMEN20 |
| G225 | P23525 | 478 | Prom-G225 | Promoter-reporter | N1112 | P21142 |
| G225 | P25137 | 479 | Prom-G225 | Promoter-reporter (YFP/LTI6b) | N1112 | P25755 |
| G226 | P3359 | 480 | opLexA | 2-components-supTfn (TF | N3 | P5480 |
| | | | | component of two-component | | |
| | | | | system) | | |
| G226 | P23526 | 481 | Prom-G226 | Promoter-reporter | N1113 | P21142 |
| G226 | P25138 | 482 | Prom-G226 | Promoter-reporter (YFP/LTI6b) | N1113 | P25755 |
| G481 | P21294 | 483 | 35S | RNAi (GS) | N2 | P21103 |
| G481 | P21300 | 484 | 35S | RNAi (clade) | N2 | P21103 |
| G481 | P21206 | 485 | 35S | Direct GR-fusion C-term | N2 | P21171 |
| G481 | P21281 | 486 | 35S | Direct GR-fusion HA C-term | N2 | P21172 |
| G481 | P21212 | 487 | 35S | Direct GR-fusion N-term | N2 | P21173 |
| G481 | P21287 | 488 | 35S | Direct GR-fusion HA N-term | N2 | P21174 |
| G481 | P21159 | 489 | 35S | RNAi (clade) | N2 | P21103 |
| G481 | P21305 | 490 | 35S | RNAi (clade) | N2 | P21103 |
| G481 | P21200 | 491 | 35S | GAL4 N-term | N2 | P21195 |
| G481 | P25281 | 492 | 35S | Protein-GFP-C-fusion | N2 | P25799 |
| G481 | P46 | 493 | 35S | Direct promoter-fusion | N2 | pMEN20 |
| G481 | P21146 | 494 | 35S | GAL4 C-term | N2 | P5425 |
| G481 | P21274 | 495 | 35S | TF dom neg deln 2ndry domain | N2 | pMEN65 |
| G481 | P21273 | 496 | 35S | TF dominant negative deletion | N2 | pMEN65 |
| G481 | P25885 | 497 | 35S | site-directed mutation_1 | N2 | pMEN65 |
| G481 | P25886 | 498 | 35S | site-directed mutation_2 | N2 | pMEN65 |
| G481 | P25888 | 499 | 35S | site-directed mutation_4 | N2 | pMEN65 |
| G481 | P25889 | 500 | 35S | site-directed mutation_5 | N2 | pMEN65 |
| G481 | P25890 | 501 | 35S | site-directed mutation_6 | N2 | pMEN65 |
| G481 | P26040 | 502 | 35S | Protein-CFP-C-fusion | N2 | P25801 |
| G481 | P25891 | 503 | 35S | domain swap_1 | N2 | pMEN65 |
| G481 | P25893 | 504 | 35S | splice_variant_1 | N2 | pMEN65 |
| G481 | P23325 | 505 | LTP1 | Direct promoter-fusion | N1141 | pMEN65 |
| G481 | P6812 | 506 | opLexA | 2-components-supTfn (TF | N3 | P5480 |
| | | | | component of two-component | | |
| | | | | system) | | |
| G481 | P25285 | 507 | opLexA | 2-components-supTfn-TAP-C-term | N3 | P25420 |
| | | | | (TF component of two-component | | |
| | | | | system) | | |
| G481 | P25455 | 508 | opLexA | 2-components-supTfn-HA-C-term | N3 | P25461 |
| | | | | (TF component of two-component | | |
| | | | | system) | | |
| G481 | P26263 | 509 | opLexA | 2-components-supTfn-HA-N-term | N3 | P25976 |
| | | | | (TF component of two-component | | |
| | | | | system) | | |
| G481 | P21167 | 510 | Prom-G481 | Promoter-reporter | N515 | P21142 |
| G481 | P25610 | 511 | Prom-G481 | Promoter-reporter | N515 | P32122 |
| G481 | P21522 | 512 | SUC2 | Direct promoter-fusion | N1142 | pMEN65 |
| G482 | P47 | 513 | 35S | Direct promoter-fusion | N2 | pMEN20 |
| G482 | P26041 | 514 | 35S | Protein-CFP-C-fusion | N2 | P25801 |
| G482 | P5072 | 515 | opLexA | 2-components-supTfn (TF | N3 | P5381 |
| | | | | component of two-component | | |
| | | | | system) | | |
| G483 | P48 | 516 | 35S | Direct promoter-fusion | N2 | pMEN20 |
| G483 | P26226 | 517 | 35S | Protein-YFP-C-fusion | N2 | P25800 |
| G484 | P26276 | 518 | 35S | Protein-CFP-C-fusion | N2 | P25801 |
| G485 | P1441 | 519 | 35S | Direct promoter-fusion | N2 | pMEN65 |
| G485 | P26044 | 520 | 35S | Protein-CFP-C-fusion | N2 | P25801 |
| G485 | P25892 | 521 | 35S | domain swap_1 | N2 | pMEN65 |
| G485 | P4190 | 522 | opLexA | 2-components-supTfn (TF | N3 | P5381 |
| | | | | component of two-component | | |
| | | | | system) | | |
| G489 | P51 | 523 | 35S | Direct promoter-fusion | N2 | pMEN20 |
| G489 | P26060 | 524 | 35S | Protein-YFP-C-fusion | N2 | P25800 |
| G489 | P3404 | 525 | opLexA | 2-components-supTfn (TF | N3 | P5381 |
| | | | | component of two-component | | |
| | | | | system) | | |
| G515 | P25421 | 526 | 35S | Direct promoter-fusion | N2 | pMEN65 |
| G516 | P279 | 527 | 35S | Direct promoter-fusion | N2 | pMEN20 |
| G517 | P2035 | 528 | 35S | Direct promoter-fusion | N2 | pMEN65 |
| G589 | P1042 | 529 | 35S | Direct promoter-fusion | N2 | pMEN20 |
| G591 | P77 | 530 | 35S | Direct promoter-fusion | N2 | pMEN20 |
| G592 | P310 | 531 | 35S | Direct promoter-fusion | N2 | pMEN20 |
| G592 | P25130 | 532 | Prom-G592 | Promoter-reporter | N1125 | P21142 |
| G592 | P25131 | 533 | Prom-G592 | Promoter-reporter (YFP/LTI6b) | N1125 | P25755 |
| G634 | P324 | 534 | 35S | Direct promoter-fusion | N2 | pMEN20 |
| G634 | P1374 | 535 | 35S | Direct promoter-fusion | N2 | pMEN65 |
| G634 | P1717 | 536 | 35S | Direct promoter-fusion | N2 | pMEN65 |
| G682 | P21299 | 537 | 35S | RNAi (clade) | N2 | P21103 |
| G682 | P21204 | 538 | 35S | Direct GR-fusion C-term | N2 | P21171 |
| G682 | P21279 | 539 | 35S | Direct GR-fusion HA C-term | N2 | P21172 |
| G682 | P23483 | 540 | 35S | Direct GR-fusion N-term | N2 | P21173 |
| G682 | P21111 | 541 | 35S | RNAi (GS) | N2 | P21103 |
| G682 | P23482 | 542 | 35S | GAL4 N-term | N2 | P21195 |
| G682 | P25290 | 543 | 35S | Protein-GFP-C-fusion | N2 | P25799 |
| G682 | P108 | 544 | 35S | Direct promoter-fusion | N2 | pMEN20 |
| G682 | P21144 | 545 | 35S | GAL4 C-term | N2 | P5425 |
| G682 | P23328 | 546 | LTP1 | Direct promoter-fusion | N1141 | pMEN65 |
| G682 | P5099 | 547 | opLexA | 2-components-supTfn (TF | N3 | P5381 |
| | | | | component of two-component | | |
| | | | | system) | | |
| G682 | P23516 | 548 | opLexA | 2-components-supTfn (TF | N3 | P5381 |
| | | | | component of two-component | | |
| | | | | system) | | |
| G682 | P23517 | 549 | opLexA | 2-components-supTfn (TF | N3 | P5381 |
| | | | | component of two-component | | |
| | | | | system) | | |
| G682 | P25656 | 550 | opLexA | 2-components-supTfn-TAP-C-term | N3 | P25420 |
| | | | | (TF component of two-component | | |
| | | | | system) | | |
| G682 | P25457 | 551 | opLexA | 2-components-supTfn-HA-C-term | N3 | P25461 |
| | | | | (TF component of two-component | | |
| | | | | system) | | |
| G682 | P26264 | 552 | opLexA | 2-components-supTfn-HA-N-term | N3 | P25976 |
| | | | | (TF component of two-component | | |
| | | | | system) | | |
| G682 | P21166 | 553 | Prom-G682 | Promoter-reporter | N514 | P21142 |
| G682 | P25611 | 554 | Prom-G682 | Promoter-reporter | N514 | P32122 |
| G682 | P25141 | 555 | Prom-G682 | Promoter-reporter (YFP/LTI6b) | N514 | P25755 |
| G682 | P21525 | 556 | SUC2 | Direct promoter-fusion | N1142 | pMEN65 |
| G867 | P21207 | 557 | 35S | Direct GR-fusion C-term | N2 | P21171 |
| G867 | P21282 | 558 | 35S | Direct GR-fusion HA C-term | N2 | P21172 |
| G867 | P21213 | 559 | 35S | Direct GR-fusion N-term | N2 | P21173 |
| G867 | P21288 | 560 | 35S | Direct GR-fusion HA N-term | N2 | P21174 |
| G867 | P21297 | 561 | 35S | RNAi (GS) | N2 | P21103 |
| G867 | P21162 | 562 | 35S | RNAi (clade) | N2 | P21103 |
| G867 | P21303 | 563 | 35S | RNAi (clade) | N2 | P21103 |
| G867 | P21304 | 564 | 35S | RNAi (clade) | N2 | P21103 |
| G867 | P21201 | 565 | 35S | GAL4 N-term | N2 | P21195 |
| G867 | P25301 | 566 | 35S | Protein-GFP-C-fusion | N2 | P25799 |
| G867 | P383 | 567 | 35S | Direct promoter-fusion | N2 | pMEN20 |
| G867 | P21193 | 568 | 35S | GAL4 C-term | N2 | P5425 |
| G867 | P21276 | 569 | 35S | TF dom neg deln 2ndry domain | N2 | pMEN65 |
| G867 | P21275 | 570 | 35S | TF dominant negative deletion | N2 | pMEN65 |
| G867 | P23315 | 571 | ARSK1 | Direct promoter-fusion | N82 | pMEN65 |
| G867 | P7140 | 572 | opLexA | 2-components-supTfn (TF | N3 | P5480 |
| | | | | component of two-component | | |
| | | | | system) | | |
| G867 | P25305 | 573 | opLexA | 2-components-supTfn-TAP-C-term | N3 | P25420 |
| | | | | (TF component of two-component | | |
| | | | | system) | | |
| G867 | P25459 | 574 | opLexA | 2-components-supTfn-HA-C-term | N3 | P25461 |
| | | | | (TF component of two-component | | |
| | | | | system) | | |
| G867 | P26265 | 575 | opLexA | 2-components-supTfn-HA-N-term | N3 | P25976 |
| | | | | (TF component of two-component | | |
| | | | | system) | | |
| G867 | P21170 | 576 | Prom-G867 | Promoter-reporter | N518 | P21142 |
| G867 | P25606 | 577 | Prom-G867 | Promoter-reporter | N518 | P32122 |
| G867 | P21524 | 578 | SUC2 | Direct promoter-fusion | N1142 | pMEN65 |
| G922 | P1898 | 579 | 35S | Direct promoter-fusion | N2 | pMEN65 |
| G922 | P4593 | 580 | opLexA | 2-components-supTfn (TF | N3 | P5381 |
| | | | | component of two-component | | |
| | | | | system) | | |
| G926 | P15491 | 581 | 35S | Direct promoter-fusion | N2 | pMEN65 |
| G926 | P26217 | 582 | 35S | Protein-YFP-C-fusion | N2 | P25800 |
| G927 | P142 | 583 | 35S | Direct Promoter-fusion | N2 | pMEN20 |
| G927 | P26197 | 584 | 35S | Protein-YFP-C-fusion | N2 | P25800 |
| G928 | P143 | 585 | 35S | Direct promoter-fusion | N2 | pMEN20 |
| G928 | P26223 | 586 | 35S | Protein-YFP-C-fusion | N2 | P25800 |
| G993 | P1268 | 587 | 35S | Direct promoter-fusion | N2 | pMEN65 |
| G993 | P21149 | 588 | opLexA | 2-components-supTfn (TF | N3 | P5381 |
| | | | | component of two-component | | |
| | | | | system) | | |
| G1006 | P417 | 589 | 35S | Direct promoter-fusion | N2 | pMEN20 |
| G1006 | P25647 | 590 | Prom-G1006 | Promoter-reporter | N1145 | P21142 |
| G1006 | P25646 | 591 | Prom-G1006 | Promoter-reporter (YFP/LTI6b) | N1145 | P25755 |
| G1667 | P1079 | 592 | 35S | Direct promoter-fusion | N2 | pMEN65 |
| G1067 | P443 | 593 | 35S | Direct promoter-fusion | N2 | pMEN20 |
| G1067 | P7832 | 594 | opLexA | 2-components-supTfn (TF | N3 | P5480 |
| | | | | component of two-component | | |
| | | | | system) | | |
| G1067 | P25099 | 595 | Prom-G1067 | Promoter-reporter | N1095 | P21142 |
| G1069 | P1178 | 596 | 35S | Direct promoter-fusion | N2 | pMEN65 |
| G1069 | P25101 | 597 | Prom-G1069 | Promoter-reporter | N1096 | P21142 |
| G1069 | P25102 | 598 | Prom-G1069 | Promoter-reporter (YFP/LTI6b) | N1096 | P25755 |
| G1073 | P21295 | 599 | 35S | RNAi (GS) | N2 | P21103 |
| G1073 | P21301 | 600 | 35S | RNAi (clade) | N2 | P21103 |
| G1073 | P21205 | 601 | 35S | Direct GR-fusion C-term | N2 | P21171 |
| G1073 | P21280 | 602 | 35S | Direct GR-fusion HA C-term | N2 | P21172 |
| G1073 | P21211 | 603 | 35S | Direct GR-fusion N-term | N2 | P21173 |
| G1073 | P21286 | 604 | 35S | Direct GR-fusion HA N-term | N2 | P21174 |
| G1073 | P21117 | 605 | 35S | RNAi (GS) | N2 | P21103 |
| G1073 | P21160 | 606 | 35S | RNAi (clade) | N2 | P21103 |
| G1073 | P21199 | 607 | 35S | GAL4 N-term | N2 | P21195 |
| G1073 | P25263 | 608 | 35S | Protein-GFP-C-fusion | N2 | P25799 |
| G1073 | P448 | 609 | 35S | Direct promoter-fusion | N2 | pMEN20 |
| G1073 | P21145 | 610 | 35S | GAL4 C-term | N2 | P5425 |
| G1073 | P25703 | 611 | 35S | Direct promoter-fusion | N2 | pMEN65 |
| G1073 | P21271 | 612 | 35S | TF dominant negative deletion | N2 | pMEN65 |
| G1073 | P21272 | 613 | 35S | TF dom neg deln 2ndry domain | N2 | pMEN65 |
| G1073 | P3369 | 614 | opLexA | 2-components-supTfn (TF | N3 | P5480 |
| | | | | component of two-component | | |
| | | | | system) | | |
| G1073 | P25267 | 615 | opLexA | 2-components-supTfn-TAP-C-term | N3 | P25420 |
| | | | | (TF component of two-component | | |
| | | | | system) | | |
| G1073 | P25265 | 616 | opLexA | 2-components-supTfn-HA-C-term | N3 | P25461 |
| | | | | (TF component of two-component | | |
| | | | | system) | | |
| G1073 | P21168 | 617 | Prom-G1073 | Promoter-reporter | N516 | P21142 |
| G1073 | P25104 | 618 | Prom-G1073 | Promoter-reporter (YFP/LTI6b) | N516 | P25755 |
| G1073 | P21521 | 619 | SUC2 | Direct promoter-fusion | N1142 | pMEN65 |
| G1134 | P467 | 620 | 35S | Direct promoter-fusion | N2 | pMEN20 |
| G1248 | P1446 | 621 | 35S | Direct promoter-fusion | N2 | pMEN65 |
| G1248 | P26045 | 622 | 35S | Protein-CFP-C-fusion | N2 | P25801 |
| G1266 | P483 | 623 | 35S | Direct promoter-fusion | N2 | pMEN20 |
| G1266 | P7154 | 624 | opLexA | 2-components-supTfn (TF | N3 | P5480 |
| | | | | component of two-component | | |
| | | | | system) | | |
| G1274 | P25203 | 625 | 35S | Direct GR-fusion C-term | N2 | P21171 |
| G1274 | P25221 | 626 | 35S | Direct GR-fusion N-term | N2 | P21173 |
| G1274 | P25659 | 627 | 35S | GAL4 N-term | N2 | P21195 |
| G1274 | P25658 | 628 | 35S | GAL4 C-term | N2 | P21378 |
| G1274 | P25269 | 629 | 35S | Protein-GFP-C-fusion | N2 | P25799 |
| G1274 | P15038 | 630 | 35S | Direct promoter-fusion | N2 | pMEN1963 |
| G1274 | P25742 | 631 | 35S | site-directed mutation_1 | N2 | pMEN65 |
| G1274 | P25743 | 632 | 35S | site-directed mutation_2 | N2 | pMEN65 |
| G1274 | P25745 | 633 | 35S | site-directed mutation_3 | N2 | pMEN65 |
| G1274 | P25746 | 634 | 35S | site-directed mutation_4 | N2 | pMEN65 |
| G1274 | P25744 | 635 | 35S | site-directed mutation_5 | N2 | pMEN65 |
| G1274 | P25435 | 636 | 35S | domain swap_1 | N2 | pMEN65 |
| G1274 | P25255 | 637 | opLexA | 2-components-supTfn-TAP-C-term | N3 | P25420 |
| | | | | (TF component of two-component | | |
| | | | | system) | | |
| G1274 | P8239 | 638 | opLexA | 2-components-supTfn (TF | N3 | P5480 |
| | | | | component of two-component | | |
| | | | | system) | | |
| G1274 | P25253 | 639 | opLexA | 2-components-supTfn-HA-C-term | N3 | P25461 |
| | | | | (TF component of two-component | | |
| | | | | system) | | |
| G1274 | P26258 | 640 | opLexA | 2-components-supTfn-HA-N-term | N3 | P25976 |
| | | | | (TF component of two-component | | |
| | | | | system) | | |
| G1274 | P25109 | 641 | Prom-G1274 | Promoter-reporter | N1097 | P21142 |
| G1274 | P25110 | 642 | Prom-G1274 | Promoter-reporter (YFP/LTI6b) | N1097 | P25755 |
| G1275 | P486 | 643 | 35S | Direct promoter-fusion | N2 | pMEN20 |
| G1275 | P3412 | 644 | opLexA | 2-components-supTfn (TF | N3 | P5381 |
| | | | | component of two-component | | |
| | | | | system) | | |
| G1275 | P25111 | 645 | Prom-G1275 | Promoter-reporter | N1098 | P21142 |
| G1275 | P25996 | 646 | Prom-G1275 | Promoter-reporter (YFP/LTI6b) | N1098 | P25755 |
| G1334 | P714 | 647 | 35S | Direct promoter-fusion | N2 | pMEN20 |
| G1334 | P26238 | 648 | 35S | Protein-YFP-C-fusion | N2 | P25800 |
| G1364 | P26108 | 649 | 35S | Protein-CFP-C-fusion | N2 | P25801 |
| G1364 | P4357 | 650 | opLexA | 2-components-supTfn (TF | N3 | P5381 |
| | | | | component of two-component | | |
| | | | | system) | | |
| G1752 | P1636 | 651 | 35S | Direct promoter-fusion | N2 | pMEN65 |
| G1752 | P4390 | 652 | opLexA | 2-components-supTfn (TF | N3 | P5381 |
| | | | | component of two-component | | |
| | | | | system) | | |
| G1758 | P1224 | 653 | 35S | Direct promoter-fusion | N2 | pMEN65 |
| G1758 | P25113 | 654 | Prom-G1758 | Promoter-reporter | N1102 | P21142 |
| G1758 | P25114 | 655 | Prom-G1758 | Promoter-reporter (YFP/LTI6b) | N1102 | P25755 |
| G1781 | P965 | 656 | 35S | Direct promoter-fusion | N2 | pMEN65 |
| G1781 | P26043 | 657 | 35S | Protein-CFP-C-fusion | N2 | P25801 |
| G1791 | P25079 | 658 | 35S | Direct GR-fusion C-term | N2 | P21171 |
| G1791 | P25094 | 659 | 35S | Direct GR-fusion HA N-term | N2 | P21173 |
| G1791 | P1694 | 660 | 35S | Direct promoter-fusion | N2 | pMEN65 |
| G1791 | P4406 | 661 | opLexA | 2-components-supTfn (TF | N3 | P5381 |
| | | | | component of two-component | | |
| | | | | system) | | |
| G1791 | P25121 | 662 | Prom-G1791 | Promoter-reporter | N1103 | P21142 |
| G1791 | P25116 | 663 | Prom-G1791 | Promoter-reporter (YFP/LTI6b) | N1103 | P25755 |
| G1792 | P25084 | 664 | 35S | Direct GR-fusion C-term | N2 | P21171 |
| G1792 | P25095 | 665 | 35S | Direct GR-fusion N-term | N2 | P21173 |
| G1792 | P25093 | 666 | 35S | GAL4 N-term | N2 | P21195 |
| G1792 | P25083 | 667 | 35S | GAL4 C-term | N2 | P21378 |
| G1792 | P25438 | 668 | 35S | domain swap_1 | N2 | P21378 |
| G1792 | P25271 | 669 | 35S | Protein-GFP-C-fusion | N2 | P25799 |
| G1792 | P1695 | 670 | 35S | Direct promoter-fusion | N2 | pMEN65 |
| G1792 | P25437 | 671 | 35S | TF dominant negative deletion | N2 | pMEN65 |
| G1792 | P25738 | 672 | 35S | site-directed mutation_1 | N2 | pMEN65 |
| G1792 | P25739 | 673 | 35S | site-directed mutation_2 | N2 | pMEN65 |
| G1792 | P25740 | 674 | 35S | site-directed mutation_3 | N2 | PMEN65 |
| G1792 | P25741 | 675 | 35S | site-directed mutation_4 | N2 | pMEN65 |
| G1792 | P25446 | 676 | 35S | domain swap_2 | N2 | pMEN65 |
| G1792 | P25445 | 677 | 35S | domain swap_5 | N2 | pMEN65 |
| G1792 | P25448 | 678 | 35S | domain swap_4 | N2 | pMEN65 |
| G1792 | P25447 | 679 | 35S | domain swap_3 | N2 | pMEN65 |
| G1792 | P25119 | 680 | opLexA | 2-components-supTfn-TAP-C-term | N3 | P25420 |
| | | | | (TF component of two-component | | |
| | | | | system) | | |
| G1792 | P6071 | 681 | opLexA | 2-components-supTfn (TF | N3 | P5381 |
| | | | | component of two-component | | |
| | | | | system) | | |
| G1792 | P25118 | 682 | opLexA | 2-components-supTfn-HA-C-term | N3 | P25461 |
| | | | | (TF component of two-component | | |
| | | | | system) | | |
| G1792 | P26259 | 683 | opLexA | 2-components-supTfn-HA-N-term | N3 | P25976 |
| | | | | (TF component of two-component | | |
| | | | | system) | | |
| G1792 | P23402 | 684 | Prom-G1792 | Promoter-reporter | N1104 | P21142 |
| G1792 | P25115 | 685 | Prom-G1792 | Promoter-reporter | N1308 | P21142 |
| G1792 | P23306 | 686 | Prom-G1792 | Promoter-reporter | N1104 | P32122 |
| G1792 | P25942 | 687 | Prom-G1792 | Promoter-reporter | N1170 | P21142 |
| G1792 | P25943 | 688 | Prom-G1792 | Promoter-reporter(YFP/LTI6b) | N1170 | P25755 |
| G1795 | P1575 | 689 | 35S | Direct promoter-fusion | N2 | pMEN65 |
| G1795 | P25085 | 690 | 35S | Direct GR-fusion C-term | N2 | P21171 |
| G1795 | P25096 | 691 | 35S | Direct GR-fusion HA N-term | N2 | P21173 |
| G1795 | P6424 | 692 | opLexA | 2-components-supTfn (TF | N3 | P5480 |
| | | | | component of two-component | | |
| | | | | system) | | |
| G1816 | P8223 | 693 | opLexA | 2-components-supTfn (TF | N3 | P5480 |
| | | | | component of two-component | | |
| | | | | system) | | |
| G1818 | P1677 | 694 | 35S | Direct promoter-fusion | N2 | pMEN65 |
| G1818 | P26159 | 695 | 35S | Protein-YFP-C-fusion | N2 | P25800 |
| G1819 | P1285 | 696 | 35S | Direct promoter-fusion | N2 | pMEN65 |
| G1819 | P26065 | 697 | 35S | Protein-YFP-C-fusion | N2 | P25800 |
| G1820 | P1284 | 698 | 35S | Direct promoter-fusion | N2 | pMEN65 |
| G1820 | P26064 | 699 | 35S | Protein-YFP-C-fusion | N2 | P25800 |
| G1820 | P3372 | 700 | opLexA | 2-components-supTfn (TF | N3 | P5480 |
| | | | | component of two-component | | |
| | | | | system) | | |
| G1821 | P26037 | 701 | 35S | Protein-CFP-C-fusion | N2 | P25801 |
| G1836 | P26052 | 702 | 35S | Protein-YFP-C-fusion | N2 | P25800 |
| G1836 | P3603 | 703 | opLexA | 2-components-supTfn (TF | N3 | P5381 |
| | | | | component of two-component | | |
| | | | | system) | | |
| G1919 | P1581 | 704 | 35S | Direct promoter-fusion | N2 | pMEN65 |
| G1927 | P2029 | 705 | 35S | Direct promoter-fusion | N2 | pMEN65 |
| G1930 | P1310 | 706 | 35S | Direct promoter-fusion | N2 | pMEN65 |
| G1930 | P3373 | 707 | opLexA | 2-components-supTfn (TF | N3 | P5480 |
| | | | | component of two-component | | |
| | | | | system) | | |
| G2010 | P1278 | 708 | 35S | Direct promoter-fusion | N2 | pMEN65 |
| G2053 | P2032 | 709 | 35S | Direct promoter-fusion | N2 | pMEN65 |
| G2115 | P1507 | 710 | 35S | Direct promoter-fusion | N2 | pMEN65 |
| G2133 | P1572 | 711 | 35S | Direct promoter-fusion | N2 | pMEN65 |
| G2133 | P4361 | 712 | opLexA | 2-components-supTfn (TF | N3 | P5381 |
| | | | | component of two-component | | |
| | | | | system) | | |
| G2133 | P25132 | 713 | Prom-G2133 | Promoter-reporter | N1108 | P21142 |
| G2133 | P25133 | 714 | Prom-G2133 | Promoter-reporter (YFP/LTI6b) | N1108 | P25755 |
| G2149 | P2065 | 715 | 35S | Direct promoter-fusion | N2 | pMEN1963 |
| G2153 | P1740 | 716 | 35S | Direct promoter-fusion | N2 | pMEN65 |
| G2153 | P4524 | 717 | opLexA | 2-components-supTfn (TF | N3 | P5381 |
| | | | | component of two-component | | |
| | | | | system) | | |
| G2153 | P25105 | 718 | Prom-G2153 | Promoter-reporter | N1110 | P21142 |
| G2156 | P1721 | 719 | 35S | Direct promoter-fusion | N2 | pMEN65 |
| G2156 | P4418 | 720 | opLexA | 2-components-supTfn (TF | N3 | P5381 |
| | | | | component of two-component | | |
| | | | | system) | | |
| G2156 | P25107 | 721 | Prom-G2156 | Promoter-reporter | N1111 | P21142 |
| G2157 | P1722 | 722 | 35S | Direct promoter-fusion | N2 | pMEN65 |
| G2345 | P26296 | 723 | 35S | Protein-CFP-C-fusion | N2 | P25801 |
| G2345 | P8079 | 724 | opLexA | 2-components-supTfn (TF | N3 | P5480 |
| | | | | component of two-component | | |
| | | | | system) | | |
| G2517 | P1833 | 725 | 35S | Direct promoter-fusion | N2 | pMEN65 |
| G2539 | P13710 | 726 | 35S | Direct promoter-fusion | N2 | pMEN1963 |
| G2555 | P2069 | 727 | 35S | Direct promoter-fusion | N2 | pMEN65 |
| G2637 | P13696 | 728 | 35S | Direct promoter-fusion | N2 | pMEN1963 |
| G2637 | P26054 | 729 | 35S | Protein-YFP-C-fusion | N2 | P25800 |
| G2718 | P8664 | 730 | opLexA | 2-components-supTfn (TF | N3 | P5480 |
| | | | | component of two-component | | |
| | | | | system) | | |
| G2718 | P23528 | 731 | Prom-G2718 | Promoter-reporter | N1116 | P21142 |
| G2718 | P25139 | 732 | Prom-G2718 | Promoter-reporter (YFP/LTI6b) | N1116 | P25755 |
| G2766 | P2532 | 733 | 35S | Direct promoter-fusion | N2 | pMEN1963 |
| G2989 | P2425 | 734 | 35S | Direct promoter-fusion | N2 | pMEN1963 |
| G2990 | P2426 | 735 | 35S | Direct promoter-fusion | N2 | pMEN1963 |
| G2991 | P2423 | 736 | 35S | Direct promoter-fusion | N2 | pMEN1963 |
| G2992 | P2427 | 737 | 35S | Direct promoter-fusion | N2 | pMEN1963 |
| G2993 | P13792 | 738 | 35S | Direct promoter-fusion | N2 | pMEN1963 |
| G2994 | P2434 | 739 | 35S | Direct promoter-fusion | N2 | pMEN1963 |
| G2995 | P25364 | 740 | 35S | Direct promoter-fusion | N2 | pMEN65 |
| G2996 | P2424 | 741 | 35S | Direct promoter-fusion | N2 | pMEN1963 |
| G2997 | P15364 | 742 | 35S | Direct promoter-fusion | N2 | pMEN65 |
| G2998 | P2431 | 743 | 35S | Direct promoter-fusion | N2 | pMEN1963 |
| G2999 | P25148 | 744 | 35S | Direct GR-fusion C-term | N2 | P21171 |
| G2999 | P25174 | 745 | 35S | Direct GR-fusion N-term | N2 | P21173 |
| G2999 | P25173 | 746 | 35S | GAL4 N-term | N2 | P21195 |
| G2999 | P25147 | 747 | 35S | GAL4 C-term | N2 | P21378 |
| G2999 | P25275 | 748 | 35S | Protein-GFP-C-fusion | N2 | P25799 |
| G2999 | P15277 | 749 | 35S | Direct promoter-fusion | N2 | pMEN1963 |
| G2999 | P25737 | 750 | 35S | site-directed mutation_1 | N2 | pMEN65 |
| G2999 | P25736 | 751 | 35S | site-directed mutation_2 | N2 | pMEN65 |
| G2999 | P25191 | 752 | opLexA | 2-components-supTfn-TAP-C-term | N3 | P25420 |
| | | | | (TF component of two-component | | |
| | | | | system) | | |
| G2999 | P8587 | 753 | opLexA | 2-components-supTfn (TF | N3 | P5480 |
| | | | | component of two-component | | |
| | | | | system) | | |
| G2999 | P25190 | 754 | opLexA | 2-components-supTfn-HA-C-term | N3 | P25461 |
| | | | | (TF component of two-component | | |
| | | | | system) | | |
| G2999 | P26260 | 755 | opLexA | 2-components-supTfn-HA-N-term | N3 | P25976 |
| | | | | (TF component of two-component | | |
| | | | | system) | | |
| G3000 | P23554 | 756 | 35S | Direct promoter-fusion | N2 | pMEN65 |
| G3001 | P2433 | 757 | 35S | Direct promoter-fusion | N2 | pMEN1963 |
| G3002 | P15113 | 758 | 35S | Direct promoter-fusion | N2 | pMEN1963 |
| G3074 | P2712 | 759 | 35S | Direct promoter-fusion | N2 | pMEN1963 |
| G3074 | P26055 | 760 | 35S | Protein-YFP-C-fusion | N2 | P25800 |
| G3086 | P25664 | 761 | 35S | Direct GR-fusion N-term | N2 | P21173 |
| G3086 | P25662 | 762 | 35S | GAL4 N-term | N2 | P21195 |
| G3086 | P25660 | 763 | 35S | GAL4 C-term | N2 | P21378 |
| G3086 | P25277 | 764 | 35S | Protein-GFP-C-fusion | N2 | P25799 |
| G3086 | P15046 | 765 | 35S | Direct promoter-fusion | N2 | pMEN1963 |
| G3086 | P26196 | 766 | 35S | Direct GR-fusion C-term | N2 | P21171 |
| G3086 | P8242 | 767 | opLexA | 2-components-supTfn (TF | N3 | P5480 |
| | | | | component of two-component | | |
| | | | | system) | | |
| G3086 | P25756 | 768 | opLexA | 2-components-supTfn-TAP-C-term | N3 | P25420 |
| | | | | (TF component of two-component | | |
| | | | | system) | | |
| G3086 | P25757 | 769 | opLexA | 2-components-supTfn-HA-C-term | N3 | P25461 |
| | | | | (TF component of two-component | | |
| | | | | system) | | |
| G3086 | P25128 | 770 | Prom-G3086 | Promoter-reporter | N1119 | P21142 |
| G3086 | P25129 | 771 | Prom-G3086 | Promoter-reporter (YFP/LTI6b) | N1119 | P25755 |
| G3380 | P21460 | 772 | 35S | Direct promoter-fusion | N2 | pMEN65 |
| G3381 | P21461 | 773 | 35S | Direct promoter-fusion | N2 | pMEN65 |
| G3381 | P25098 | 774 | opLexA | 2-components-supTfn (TF | N3 | pMEN65 |
| | | | | component of two-component | | |
| | | | | system) | | |
| G3383 | P23523 | 775 | 35S | Direct promoter-fusion | N2 | pMEN65 |
| G3388 | P21266 | 776 | 35S | Direct promoter-fusion | N2 | pMEN65 |
| G3388 | P21327 | 777 | 35S | Direct promoter-fusion | N2 | pMEN65 |
| G3389 | P21260 | 778 | 35S | Direct promoter-fusion | N2 | pMEN65 |
| G3390 | P21375 | 779 | 35S | Direct promoter-fusion | N2 | pMEN65 |
| G3390 | P21258 | 780 | 35S | Direct promoter-fusion | N2 | pMEN65 |
| G3391 | P21257 | 781 | 35S | Direct promoter-fusion | N2 | pMEN65 |
| G3392 | P21255 | 782 | 35S | Direct promoter-fusion | N2 | pMEN65 |
| G3393 | P21254 | 783 | 35S | Direct promoter-fusion | N2 | pMEN65 |
| G3393 | P21256 | 784 | 35S | Direct promoter-fusion | N2 | pMEN65 |
| G3394 | P21248 | 785 | 35S | Direct promoter-fusion | N2 | pMEN65 |
| G3394 | P23384 | 786 | 35S | Direct promoter-fusion | N2 | pMEN65 |
| G3394 | P23481 | 787 | 35S | Direct promoter-fusion | N2 | pMEN65 |
| G3395 | P21253 | 788 | 35S | Direct promoter-fusion | N2 | pMEN65 |
| G3396 | P23304 | 789 | 35S | Direct promoter-fusion | N2 | pMEN65 |
| G3397 | P21265 | 790 | 35S | Direct promoter-fusion | N2 | pMEN65 |
| G3398 | P21252 | 791 | 35S | Direct promoter-fusion | N2 | pMEN65 |
| G3399 | P21269 | 792 | 35S | Direct promoter-fusion | N2 | pMEN65 |
| G3399 | P21465 | 793 | 35S | Direct promoter-fusion | N2 | pMEN65 |
| G3400 | P21244 | 794 | 35S | Direct promoter-fusion | N2 | pMEN65 |
| G3401 | P21264 | 795 | 35S | Direct promoter-fusion | N2 | pMEN65 |
| G3406 | P21238 | 796 | 35S | Direct promoter-fusion | N2 | pMEN65 |
| G3407 | P21243 | 797 | 35S | Direct promoter-fusion | N2 | pMEN65 |
| G3408 | P21246 | 798 | 35S | Direct promoter-fusion | N2 | pMEN65 |
| G3429 | P21251 | 799 | 35S | Direct promoter-fusion | N2 | pMEN65 |
| G3430 | P21267 | 800 | 35S | Direct promoter-fusion | N2 | pMEN65 |
| G3431 | P21324 | 801 | 35S | Direct promoter-fusion | N2 | pMEN65 |
| G3432 | P21318 | 802 | 35S | Direct promoter-fusion | N2 | pMEN65 |
| G3434 | P21466 | 803 | 35S | Direct promoter-fusion | N2 | pMEN65 |
| G3435 | P21314 | 804 | 35S | Direct promoter-fusion | N2 | pMEN65 |
| G3436 | P21381 | 805 | 35S | Direct promoter-fusion | N2 | pMEN65 |
| G3436 | P21315 | 806 | 35S | Direct promoter-fusion | N2 | pMEN65 |
| G3444 | P21320 | 807 | 35S | Direct promoter-fusion | N2 | pMEN65 |
| G3445 | P21352 | 808 | 35S | Direct promoter-fusion | N2 | pMEN65 |
| G3446 | P21353 | 809 | 35S | Direct promoter-fusion | N2 | pMEN65 |
| G3447 | P21354 | 810 | 35S | Direct promoter-fusion | N2 | pMEN65 |
| G3448 | P21355 | 811 | 35S | Direct promoter-fusion | N2 | pMEN65 |
| G3449 | P21356 | 812 | 35S | Direct promoter-fusion | N2 | pMEN65 |
| G3450 | P21351 | 813 | 35S | Direct promoter-fusion | N2 | pMEN65 |
| G3451 | P21500 | 814 | 35S | Direct promoter-fusion | N2 | pMEN65 |
| G3452 | P21501 | 815 | 35S | Direct promoter-fusion | N2 | pMEN65 |
| G3453 | P23348 | 816 | 35S | Direct promoter-fusion | N2 | pMEN65 |
| G3455 | P21495 | 817 | 35S | Direct promoter-fusion | N2 | pMEN65 |
| G3456 | P21328 | 818 | 35S | Direct promoter-fusion | N2 | pMEN65 |
| G3456 | P21467 | 819 | 35S | Direct promoter-fusion | N2 | pMEN65 |
| G3458 | P21330 | 820 | 35S | Direct promoter-fusion | N2 | pMEN65 |
| G3459 | P21331 | 821 | 35S | Direct promoter-fusion | N2 | pMEN65 |
| G3460 | P21332 | 822 | 35S | Direct promoter-fusion | N2 | pMEN65 |
| G3470 | P21341 | 823 | 35S | Direct promoter-fusion | N2 | pMEN65 |
| G3470 | P21471 | 824 | 35S | Direct promoter-fusion | N2 | pMEN65 |
| G3471 | P21342 | 825 | 35S | Direct promoter-fusion | N2 | pMEN65 |
| G3472 | P21348 | 826 | 35S | Direct promoter-fusion | N2 | pMEN65 |
| G3474 | P21344 | 827 | 35S | Direct promoter-fusion | N2 | pMEN65 |
| G3474 | P21469 | 828 | 35S | Direct promoter-fusion | N2 | pMEN65 |
| G3475 | P21347 | 829 | 35S | Direct promoter-fusion | N2 | pMEN65 |
| G3476 | P21345 | 830 | 35S | Direct promoter-fusion | N2 | pMEN65 |
| G3478 | P21350 | 831 | 35S | Direct promoter-fusion | N2 | pMEN65 |
| G3515 | P21401 | 832 | 35S | Direct promoter-fusion | N2 | pMEN65 |
| G3516 | P21402 | 833 | 35S | Direct promoter-fusion | N2 | pMEN65 |
| G3517 | P21403 | 834 | 35S | Direct promoter-fusion | N2 | pMEN65 |
| G3518 | P21404 | 835 | 35S | Direct promoter-fusion | N2 | pMEN65 |
| G3519 | P21405 | 836 | 35S | Direct promoter-fusion | N2 | pMEN65 |
| G3520 | P21406 | 837 | 35S | Direct promoter-fusion | N2 | pMEN65 |
| G3556 | P21493 | 838 | 35S | Direct promoter-fusion | N2 | pMEN65 |
| G3643 | P23465 | 839 | 35S | Direct promoter-fusion | N2 | pMEN65 |
| G3644 | P23455 | 840 | 35S | Direct promoter-fusion | N2 | pMEN65 |
| G3644 | P25188 | 841 | opLexA | 2-components-supTfn (TF | N3 | P5381 |
| | | | | component of two-component | | |
| | | | | system) | | |
| G3649 | P23456 | 842 | 35S | Direct promoter-fusion | N2 | pMEN65 |
| G3650 | P25402 | 843 | 35S | Direct promoter-fusion | N2 | pMEN65 |
| G3659 | P23452 | 844 | 35S | Direct promoter-fusion | N2 | pMEN65 |
| G3660 | P23418 | 845 | 35S | Direct promoter-fusion | N2 | pMEN65 |
| G3661 | P23419 | 846 | 35S | Direct promoter-fusion | N2 | pMEN65 |
| G3676 | P25159 | 847 | 35S | Direct promoter-fusion | N2 | pMEN65 |
| G3681 | P25163 | 848 | 35S | Direct promoter-fusion | N2 | pMEN65 |
| G3685 | P25166 | 849 | 35S | Direct promoter-fusion | N2 | pMEN65 |
| G3686 | P25167 | 850 | 35S | Direct promoter-fusion | N2 | pMEN65 |
| G3690 | P25407 | 851 | 35S | Direct promoter-fusion | N2 | pMEN65 |
| G3717 | P23421 | 852 | 35S | Direct promoter-fusion | N2 | pMEN65 |
| G3718 | P23423 | 853 | 35S | Direct promoter-fusion | N2 | pMEN65 |
| G3719 | P25204 | 854 | 35S | Direct promoter-fusion | N2 | pMEN65 |
| G3720 | P25205 | 855 | 35S | Direct promoter-fusion | N2 | pMEN65 |
| G3721 | P25368 | 856 | 35S | Direct promoter-fusion | N2 | pMEN65 |
| G3722 | P25207 | 857 | 35S | Direct promoter-fusion | N2 | pMEN65 |
| G3723 | P25208 | 858 | 35S | Direct promoter-fusion | N2 | pMEN65 |
| G3724 | P25384 | 859 | 35S | Direct promoter-fusion | N2 | pMEN65 |
| G3724 | P25222 | 860 | opLexA | 2-components-supTfn (TF | N3 | pMEN53 |
| | | | | component of two-component | | |
| | | | | system) | | |
| G3725 | P25210 | 861 | 35S | Direct promoter-fusion | N2 | pMEN65 |
| G3726 | P25211 | 862 | 35S | Direct promoter-fusion | N2 | pMEN65 |
| G3727 | P25385 | 863 | 35S | Direct promoter-fusion | N2 | pMEN65 |
| G3728 | P25213 | 864 | 35S | Direct promoter-fusion | N2 | pMEN65 |
| G3729 | P25214 | 865 | 35S | Direct promoter-fusion | N2 | pMEN65 |
| G3730 | P25215 | 866 | 35S | Direct promoter-fusion | N2 | pMEN65 |
| G3737 | P25089 | 867 | 35S | Direct promoter-fusion | N2 | pMEN65 |
| G3739 | P25090 | 868 | 35S | Direct promoter-fusion | N2 | pMEN65 |
| G3742 | P25661 | 869 | 35S | Direct promoter-fusion | N2 | pMEN65 |
| G3744 | P25370 | 870 | 35S | Direct promoter-fusion | N2 | pMEN65 |
| G3746 | P25230 | 871 | 35S | Direct promoter-fusion | N2 | pMEN65 |
| G3750 | P25233 | 872 | 35S | Direct promoter-fusion | N2 | pMEN65 |
| G3755 | P25426 | 873 | 35S | Direct promoter-fusion | N2 | pMEN65 |
| G3760 | P25360 | 874 | 35S | Direct promoter-fusion | N2 | pMEN65 |
| G3765 | P25241 | 875 | 35S | Direct promoter-fusion | N2 | pMEN65 |
| G3766 | P25242 | 876 | 35S | Direct promoter-fusion | N2 | pMEN65 |
| G3767 | P25243 | 877 | 35S | Direct promoter-fusion | N2 | pMEN65 |
| G3768 | P25244 | 878 | 35S | Direct promoter-fusion | N2 | pMEN65 |
| G3769 | P25245 | 879 | 35S | Direct promoter-fusion | N2 | pMEN65 |
| G3771 | P25246 | 880 | 35S | Direct promoter-fusion | N2 | pMEN65 |
| G3794 | P25092 | 881 | 35S | Direct promoter-fusion | N2 | pMEN65 |
| G3803 | P25218 | 882 | 35S | Direct promoter-fusion | N2 | pMEN65 |
| G3804 | P25219 | 883 | 35S | Direct promoter-fusion | N2 | pMEN65 |
| G3841 | P25573 | 884 | 35S | Direct promoter-fusion | N2 | pMEN65 |
| G3848 | P25571 | 885 | 35S | Direct promoter-fusion | N2 | pMEN65 |
| G3856 | P25572 | 886 | 35S | Direct promoter-fusion | N2 | pMEN65 |
| G3864 | P25578 | 887 | 35S | Direct promoter-fusion | N2 | pMEN65 |
| G3876 | P25657 | 888 | 35S | Direct promoter-fusion | N2 | pMEN65 |
| n/a | P6506 | 889 | 35S | Promoter background | N2 | P5386 |
| | | | | (Promoter::LexA-GAL4TA driver | | |
| | | | | construct in 2-component system) | | |
| n/a | P5486 | 890 | 35SLEXA::GR | Promoter background | N2 | pMEN57 |
| | | | | (Promoter::LexA-GAL4TA driver | | |
| | | | | construct in 2-component system) | | |
| n/a | P5326 | 891 | AP1 | Promoter background | N207 | P5375 |
| | | | | (Promoter::LexA-GAL4TA driver | | |
| | | | | construct in 2-component system) | | |
| n/a | P5311 | 892 | ARSK1 | Promoter background | N82 | P5375 |
| | | | | (Promoter::LexA-GAL4TA driver | | |
| | | | | construct in 2-component system) | | |
| n/a | P5319 | 893 | AS1 | Promoter background | N179 | P5375 |
| | | | | (Promoter::LexA-GAL4TA driver | | |
| | | | | construct in 2-component system) | | |
| n/a | P5288 | 894 | CUT1 | Promoter background | N19 | P5375 |
| | | | | (Promoter::LexA-GAL4TA driver | | |
| | | | | construct in 2-component system) | | |
| n/a | P5287 | 895 | LTP1 | Promoter background | N18 | P5375 |
| | | | | (Promoter::LexA-GAL4TA driver | | |
| | | | | construct in 2-component system) | | |
| n/a | P5284 | 896 | RBCS3 | Promoter background | N11 | P5375 |
| | | | | (Promoter::LexA-GAL4TA driver | | |
| | | | | construct in 2-component system) | | |
| n/a | P9002 | 897 | RD29A | Promoter background | N249 | P5375 |
| | | | | (Promoter::LexA-GAL4TA driver | | |
| | | | | construct in 2-component system) | | |
| n/a | P5310 | 898 | RSI1 | Promoter background | N81 | P5375 |
| | | | | (Promoter::LexA-GAL4TA driver | | |
| | | | | construct in 2-component system) | | |
| n/a | P5318 | 899 | STM | Promoter background | N178 | P5375 |
| | | | | (Promoter::LexA-GAL4TA driver | | |
| | | | | construct in 2-component system) | | |
| n/a | P5290 | 900 | SUC2 | Promoter background | N23 | P5375 |
| | | | | (Promoter::LexA-GAL4TA driver | | |
| | | | | construct in 2-component system) | | |

[0316] The Two-Component Expression System

[0317] For the two-component system, two separate constructs are used: Promoter::LexA-GAL4TA and opLexA::TF. The first of these (Promoter::LexA-GAL4TA) comprises a desired promoter cloned in front of a LexA DNA binding domain fused to a GAL4 activation domain. The construct vector backbone (pMEN48, also known as P5375, SEQ ID NO: 906) also carries a kanamycin resistance marker, along with an opLexA::GFP reporter. Transgenic lines are obtained containing this first component, and a line is selected that shows reproducible expression of the reporter gene in the desired pattern through a number of generations. A homozygous population is established for that line, and the population is supertransformed with the second construct (opLexA::TF) carrying the TF of interest cloned behind a LexA operator site. This second construct vector backbone (pMEN53, also known as P5381, SEQ ID NO: 908) also contains a sulfonamide resistance marker.

[0318] Each of the above methods offers a number of pros and cons. A direct fusion approach allows for much simpler genetic analysis if a given promoter-TF line is to be crossed into different genetic backgrounds at a later date. The two-component method, on the other hand, potentially allows for stronger expression to be obtained via an amplification of transcription. Additionally, a range of two-component constructs were available at the start of the Lead Advancement program which had been built using funding from an Advanced Technology Program (ATP) grant.

[0319] In general, the lead TF from each study group is expressed from a range of different promoters using a two component method. Arabidopsis paralogs are also generally analyzed by the two-component method, but are typically analyzed using the only 35S promoter. However, an alternative promoter is sometimes used for paralogs when there is already a specific indication that a different promoter might afford a more useful approach (such as when use of the 35S promoter is already known to generate deleterious effects). Putative orthologs from other species are usually analyzed by overexpression from a 35S CaMV promoter via a direct promoter-fusion construct. The vector backbone for most of the direct promoter-fusion overexpression constructs is pMEN65, but pMEN1963 and pMEN20 are sometimes used.

### (2) Knock-Out/Knock-Down

[0320] Where available, T-DNA insertion lines from either the public or the in-house collections are analyzed.

[0321] In cases where a T-DNA insertion line is unavailable, an RNA interference (RNAi) strategy is sometimes used. At the outset of the program, the system was tested with two well-characterized genes [LEAFY (Weigel et al., 1992) and CONSTANS (Putterill et al., 1995)] that give clear morphological phenotypes when mutated. In each case, RNAi lines were obtained that exhibited characters seen in the null mutants.

[0322] An RNAi based strategy was taken for each of the five initial drought leads (Module 1). The approaches and target fragments that were planned for several Arabidopsis transcription factor sequences are shown in Table 19 and Table 20. For each lead gene, two constructs were designed: one being targeted to the lead gene itself and the other being targeted to the conserved domain shared by all the Arabidopsis paralogs. In some cases the RNAi fragments that were originally planned differ slightly from those that were finally included in the constructs. In such cases those differences, along with the DNA sequence of the full insert within the RNAi construct, are provided in the sequence section of the RNAi project reports for that gene. For two of the genes, G481 and G867, two alternative constructs targeting the clade of related genes were generated. Details of those constructs, G481-RNAi (clade) (P21159, P21300, P21305), and G867-RNAi (clade) (P21303, P21162, P21304), are provided in the Sequence Listing.

TABLE 19
Summary of fragments contained within gene specific
RNAi constructs for five primary genes

| GID | Target Region from ATG | Element Size |
|---|---|---|
| G682 | 191-342 | 151 bps |
| G481 | 277-677 | 400 bps |
| G1073 | 208-711 | 503 bps |
| G867 | 869-1198 | 330 bps |

Note:
The vector for all RNAi constructs (P21103) is derived from pMEN65 (Example II). A PDK intron (Waterhouse et al., 2001) was cloned into the middle of the multiple cloning sites in pMEN65, to produce this vector.

TABLE 20

Summary of fragments contained within Clade-Targeted RNAi Constructs. The entry vector for all RNAi
constructs is derived from pMEN65. A PDK intron (Waterhouse et al. (2001) was cloned into the middle
of the multiple cloning sites in pMEN65, which resulted in the entry vector.

G682
Two fragments, one from G682 and the other from G1816, will be generated and ligated together to
generate a hybrid fragment targeting the G682 clade members.
Fragment 1 sequence (125 bp) based on G682 CDS:
cttcttgttccgaagaggtgagtagtcttgagtgggaagttgtgaacatgagtcaagaagaagaagatttggtctctcgaatgcataagcttgtcggtgacag
gtgggagttgatcgccggaagg
Fragment 2 sequence (162 bp) based on G1816 CDS:
gaagtgagt ag c
atcgaatgggagtttatcaacatgactgaacaagaagaagatctcatctttcgaatgtacagacttgtcggtgataggtgggatttgatagcaggaagagttc
ctggaagacaaccagaggagatagagagata c tggat t atgagaaac

The bold italicized bases indicate positions where point mutations were introduced in the cloning
primers to increase the percentage homology with other clade members. The percentage homology of the
above fragment to each target clade member is shown below.

| | |
|---|---|
| Fragment 1 | Fragment 2 |

| | | | |
|---|---|---|---|
| GID | Homology (%) | GID | Homology (%) |

| | | | |
|---|---|---|---|
| G682 | 117/125 (93%) | G1816 | 158/162 (97%) |
| G225 | 106/125 (85%) | G226 | 148/162 (91%) |

G481
Two fragments, one from G485 and the other from G2345, will be generated and ligated together to
generate a hybrid fragment targeting G482 clade members.
Fragment 1 sequence (110 bp) based on G485 CDS:
gagcaagacaggttcttaccgatcgctaacgttagcaggatcatgaagaaagcacttcctgcgaacgcaaaaatctctaaggatgctaaagaaacgatgcagg
agtgtgt
Fragment 2 sequence (131 bp) based on G2345 CDS:
aggaatgcgtctctgagttcatcagcttcgtcaccagcgaggctagtgataagtgccaaagagagaaaaggaagaccatcaatggagatgatttgctttgggc
tatggccactttaggatttgaggattac

The bold italicized bases indicate positions where point mutations were introduced in the cloning
primers to increase the percentage homology with other clade members. The percentage homology of the
above fragment to each target clade member is shown below.

| | |
|---|---|
| Fragment 1 | Fragment 2 |

| | | | |
|---|---|---|---|
| GID | Homology (%) | GID | Homology (%) |

| | | | |
|---|---|---|---|
| G482 | 96/110 (87%) | G481 | 116/131 (88%) |
| G485 | 104/110 (94%) | G1364 | 118/131 (90%) |
| | | G2345 | 127/131 (97%) |
| | | G482 | 110/131 (84%) |

G1073
A 102 bp fragment will be generated based on the G2156 CDS between positions 216 and 318 counting from
first base of the start codon.
cgtccacgtggtcgtcctgcgggatccaagaacaagccgaagccaccggtgatagtgactagagatagccccaacgtgcttagatcacacgttcttgaagtc

The bold italicized bases indicate positions where point mutations were introduced in the cloning
primers to increase the percentage homology with other clade members. The percentage homology of the
above fragment to each target clade member is shown below.

| | |
|---|---|
| GID | Homology (%) |

| | |
|---|---|
| G1073 | 87/102 (85%) |
| G1067 | 86/102 (84%) |
| G2156 | 98/102 (96%) |

G867
A 127 bp fragment will be generated based on the G867 CDS between positions 163 and 290 counting from
the first base of the start codon.
gaaagcttccgtcgtcaaaatacaaaggtgtggtgccacaaccaaacggaagatggggagctcagatttacgagaaacaccagcgcgtgtggctcgggacatt
caacgaggaagaagaagccgctcg

The bold italicized bases indicate positions where point mutations were introduced in the cloning
primers to increase the percentage homology with other clade members. The percentage homology of the
above fragment to each target clade member is shown below.

| | |
|---|---|
| GID | Homology (%) |

| | |
|---|---|
| G867 | 123/125 (98%) |
| G9 | 111/127 (87%) |
| G993 | 105/119 (88%) |
| G1930 | 112/127 (88%) |

### (3) Protein Modifications

[0323] Addition of Non-Native Activation Domains

[0324] Translational fusions to a GAL4 acidic activation domain may be used in an attempt to alter TF potency.

[0325] Other activation domains such as VP16 may also be considered in the future.

### Deletion Variants

[0326] Truncated versions or fragments of the leads are sometimes overexpressed to test hypotheses regarding particular parts of the proteins. Such an approach can result in dominant negative alleles.

[0327] Point Mutation and Domain Swap Variants

[0328] In order to assess the role of particular conserved residues or domains, mutated versions of lead proteins with substitutions at those residues are overexpressed. In some cases, we also overexpress chimeric variants of the transcription factor in which one or domains have been exchanged with another transcription factor.

### (4) Analytical Tools for Pathway Analysis

[0329] Promoter-Reporter Constructs

[0330] Promoters are primarily cloned in front of a GUS reporter system. These constructs can be used to identify putative upstream transcriptional activators via a transient assay. In most cases approximately 2 kb of the sequence immediately 5′ to the ATG of the gene was included in the construct. The exact promoter sequences included in these constructs are provided in the Sequence Listing.

[0331] In addition to being used in transient assays, the promoter-reporter constructs are transformed into Arabidopsis. The lines are then used to characterize the expression patterns of the lead genes in planta over a variety of tissue types and stress conditions. As well as GUS, a number of fluorescent reporter proteins are used in Promoter-reporter constructs including GFP, YFP, CFP and anchored variants of YFP such as YFP-LTI6.

[0332] Protein Fusions to Fluorescent Tags

[0333] To examine sub-cellular localization of TFs, translational fusions to fluorescent markers such as GFP, CFP, and YFP are used.

[0334] Dexamethasone Inducible Lines

[0335] Glucocorticoid receptor fusions at the N and C termini of the primary TFs are being constructed to allow the identification of their immediate/early targets during array-based studies. We also produce dexamethasone inducible lines via a two-component approach.

[0336] Epitope-Tagged Variants

[0337] A number of epitope-tagged variants of each lead TF are being generated. Transgenic lines for these variants are for use in chromatin immunoprecipitation experiments (ChIP) and mass spectrometry based studies to assess protein-protein interactions and the presence of post-translational modifications. For each lead, the following are typically being made: TF-HA, HA-TF, and TF-TAP (HA=hemagglutinin epitope tag, TAP=a tandem affinity purification tag).
[0338] Definitions of particular project types, as referenced in the phenotypic screen report sections are provided in Table 21.

TABLE 21

| Project type | Definition |
|---|---|
| Direct promoter-fusion | A full-length wild-type version of a gene is directly fused to a promoter that will drive |
| (DPF) | its expression in transgenic plants. Such a promoter could be the native promoter or that |
| | gene, 35S, or a promoter that will drive tissue specific or conditional expression. |
| 2-components-supTfn | A full-length wild-type version of a gene is being expressed via the 2 component, |
| (TCST) | promoter::LexA-GAL4; opLexA::TF system. In this case, a stable transgenic line is first |
| | established containing one of the components and is later supertransformed with the |
| | second component. |
| splice_variant_* | A splice variant of a gene is directly fused to a promoter that will drive its expression in |
| | transgenic plants. Such a promoter could be the native promoter or that gene, 35S, or a |
| | promoter that will drive tissue specific or conditional expression. |
| Direct GR-fusion C- | A construct contains a TF with a direct C-terminal fusion to a glucocorticoid receptor. |
| term | |
| Direct GR-fusion N- | A construct contains a TF with a direct N-terminal fusion to a glucocorticoid receptor. |
| term | |
| Direct GR-fusion HA | A construct contains a TF with a direct C-terminal fusion to a glucocorticoid receptor in |
| C-term | combination with an HA (hemagglutinin) epitope tag in the conformation: TF-GR-HA |
| Direct GR-fusion HA | A construct contains a TF with a direct N-terminal fusion to a glucocorticoid receptor in |
| N-term | combination with an HA (hemagglutinin) epitope tag in the conformation: GR-TF-HA |
| GAL4 C-term | A TF with a C-terminal fusion to a GAL4 activation domain is being overexpressed. |
| GAL4 N-term | A TF with an N-terminal fusion to a GAL4 activation domain is being overexpressed. |
| TF dominant negative | A truncated variant or fragment of a TF is being (over)expressed, often with the aim of |
| deletion | producing a dominant negative phenotype. Usually the truncated version comprises the |
| | DNA binding domain. Projects of this category are presented in the results tables of our |
| | reports under the sections on “deletion variants. |
| TF dom neg deln 2ndry | A truncated variant or fragment of a TF is being (over)expressed, often with the aim of |
| domain | producing a dominant negative phenotype. In this case, the truncated version contains a |
| | conserved secondary domain (rather than the main DNA binding domain) or a |
| | secondary DNA binding domain alone, in the case when a TF has two potential binding |
| | domain (e.g. B3 & AP2). Projects of this category are presented in the results tables of |
| | our reports under the sections on “deletion variants. |
| deletion_* | A variant of a TF is being (over)expressed in which one or more regions have been |
| | deleted. Projects of this category are presented in the results tables of our reports under |
| | the sections on “deletion variants. |
| site-directed mutation_* | A form of the protein is being overexpressed which has had one or more residues |
| | changed by site directed mutagenesis. |
| domain swap_* | A form of the protein is being overexpressed in which a particular fragment has been |
| | substituted with a region from another protein. |
| KO | Describes a line that harbors a mutation in an Arabidopsis TF at its endogenous locus. In |
| | most cases this is caused by a T-DNA insertion. |
| RNAi (clade) | An RNAi construct designed to knock-down a clade of related genes. |
| RNAi (GS) | An RNAi construct designed to knock-down a specific gene. |
| Promoter-reporter | A construct being used to determine the expression pattern of a gene, or in transient |
| | assay experiments. This would typically be a promoter-GUS or promoter-GFP (or a |
| | derivative of GFP) fusion. |
| Protein-GFP-C-fusion | A translational fusion is being overexpressed in which the TF has GFP rased to the C- |
| | terminus. |
| Protein-YFP-C-fusion | A translational fusion is being overexpressed in which the TF has YFP fused to the C- |
| | terminus. |
| Protein-CFP-C-fusion | A translational fusion is being overexpressed in which the TF has CFP fused to the C- |
| | terminus. |
| 2-components-supTfn- | A translational fusion is being overexpressed in which the TF has a TAP tag (Tandem |
| TAP-C-term | affinity purification epitope, see Rigaut et al., 1999 and Rohila et al., 2004) fused to the |
| | C-terminus. This fusion is being expressed via the two-component system: |
| | promoter::LexA-GAL4; opLexA::TF-TAP. In this case, a stable transgenic line is first |
| | established containing the promoter component and is later supertransformed with the |
| | TF-TAP component). |
| 2-components-supTfn- | A translational fusion is being overexpressed in which the TF has an HA |
| HA-C-term | (hemagglutinin) epitope tag fused to the C-terminus. This fusion is being expressed via |
| | the two-component system: promoter::LexA-GAL4; opLexA::TF-HA. In this case, a |
| | stable transgenic line is first established containing the promoter component and is later |
| | supertransformed with the TF-HA component). |
| 2-components-supTfn- | A translational fusion is being overexpressed in which the TF has an HA |
| HA-N-term | (hemagglutinin) epitope tag fused to the N-terminus. This fusion is being expressed via |
| | the two-component system: promoter::LexA-GAL4; opLexA::HA-TF. In this case, a |
| | stable transgenic line is first established containing the promoter component and is later |
| | supertransformed with the HA-TF component). |
| Double OEX Cross | A transgenic line harboring two different overexpression constructs, created by a genetic |
| | crossing approach. |

*designates any numeric value

### Example II

### Promoter Analysis

[0339] A major component of the program is to determine the effects of ectopic expression of transcription factors in a variety of different tissue types, and in response to the onset of stress conditions. Primarily this is achieved by using a panel of different promoters via a two-component system.

[0340] Component 1: promoter driver lines (Promoter::LexA/GAL4). In each case, the first component (Promoter::LexA/GAL4) comprises a LexA DNA binding domain fused to a GAL4 activation domain, cloned behind the desired promoter. These constructs are contained within vector backbone pMEN48 (Example III) which also carries a kanamycin resistance marker, along with an opLexA::GFP reporter. The GFP is EGFP, an variant available from Clontech with enhanced signal. EGFP is soluble in the cytoplasm. Transgenic “driver lines” were first obtained containing the Promoter::LexA/GAL4 component. For each promoter driver, a line was selected which showed reproducible expression of the GFP reporter gene in the desired pattern, through a number of generations. We also tested the plants in our standard plate based physiology assays to verify that the tissue specific pattern was not substantially altered by stress conditions. A homozygous population was then established for that line.

[0341] Component 2: TF construct (opLexA::TF). Having established a promoter panel, it is possible to overexpress any transcription factor in the precise expression pattern conferred by the driver lines, by super-transforming or crossing in a second construct (opLexA::TF) carrying the TF of interest cloned behind a LexA operator site. In each case this second construct carried a sulfonamide selectable marker and was contained within vector backbone pMEN53 (see Example III).

[0342] Arabidopsis promoter driver lines are shown in Table 22 (below).

TABLE 22
Expression patterns conferred by promoters
used for two-component studies.

| | Expression pattern | | Driver |
|---|---|---|---|
| Promoter | conferred | Reference | line used |
| 35S | Constitutive | Odell et al. (1985) | line 17 |
| SUC2 | Vascular/Phloem | Truernit and Sauer | line 6 |
| | | (1995) | |
| ARSK1 | Root | Hwang and | line 8 |
| | | Goodman (1995) | |
| CUT1 | Shoot epidermal/guard cell | Kunst et al. (2000) | line 2 |
| | enhanced | | |
| RBCS3 | Photosynthetic tissue | Wanner and | line 4 |
| | | Gruissem (1991) | |
| RD29A* | Drought/Cold/ABA | Yamaguchi- | lines 2 |
| | inducible | Shinozaki and | and 5 |
| | | Shinozaki (1993) | |
| LTP1 | Shoot epidermal/trichome | Thoma et al. | line 1 |
| | enhanced | (1994) | |
| RSI1 | Root meristem and root | Taylor and | line 34 |
| | vascular | Scheuring (1994) | |
| AP1 | Flower primordia/Flower | Hempel et al. | line 16 |
| | | (1997); Mandel et | |
| | | al. (1992) | |
| STM | Meristems | Long and Barton | lines 5 |
| | | (2000); Long et al. | and 10 |
| | | (1996) | |
| AS1 | Primordia and young | Byrne et al. (2000) | line 1026 |
| | organs | | |

Notes:
Two different RD29A promoter lines, lines 2 and 5, were in use. Line 2 has a higher level of background expression than line 5. Expression from the line 2 promoter was expected to produce constitutive moderate basal transcript levels of any gene controlled by it, and to generate an increase in levels following the onset of stress. In contrast, line 5 was expected to produce lower basal levels and a somewhat sharper up-regulation of any gene under its control, following the onset of stress. Although RD29A exhibits up-regulation in response to cold and drought in mature tissues, this promoter produces relatively highly levels of expression in embryos and young seedlings.

[0343] Validation of the Promoter-driver line patterns. To demonstrate that each of the promoter driver lines could generate the desired expression pattern of a second component target at an independent locus arranged in trans, crosses were made to an opLexA::GUS line. Typically, it was confirmed that the progeny exhibited GUS activity in an equivalent region to the GFP seen in the parental promoter driver line. However, GFP can move from cell-to-cell early in development and in meristematic tissues, and hence patterns of GFP in these tissues do not strictly report gene expression.

[0344] Given that the two-component combinations for the Lead Advancement program were obtained by a supertransformation approach, we performed a separate set of control experiments in which an opLexA::GUS reporter construct was supertransformed into each of the promoter driver lines. The aim was to verify that the expression pattern was maintained for the majority of independent insertion events for the target gene. For each of the promoter lines, the pattern was maintained in the majority of supertransformants, except in the case of the SUC2 driver line. For unknown reasons, the expression from this driver line was susceptible to silencing on supertransformation. It remains to be determined whether this was a general facet of SUC2 promoter itself, following supertransformation, or whether the effect was confined specifically to the line initially selected for supertransformation. We have are therefore establishing a new SUC2 driver line for use in two-component supertransformation approaches, as well as cloning the SUC2 promoter into a transformation vector backbone to allow its use via direct-promoter fusion to different TFs. To test the promoter fragment cloned in this direct promoter-fusion vector, we created both SUC2::GFP and SUC2::GUS promoter-reporter constructs in the vector as controls. In each case, the expected expression pattern was obtained in the majority of independent transformants obtained. Preliminary results indicate that the direct fusion lines are predictable, with regard to pattern. However, expression levels are quite variable, with many lines having very low levels of vascular expression. This may suggest that the SUC2 promoter is relatively susceptible to gene silencing.

[0345] It is clear that the 35S promoter induces much higher levels of expression compared to the other promoters presently in use.

### Example III

### Vector and Cloning Information

### Vector and Cloning Information: Expression Vectors.

[0346] A list of constructs (PIDs) included in this application, indicating the promoter fragment that was used to drive the transgene, along with the cloning vector backbone, is provided in Table 23. Compilations of the sequences of promoter fragments (SEQ ID NO: 927 to 937) and the expressed transgene sequences within the PIDs (SEQ ID NO: 421 to 900) are provided in the Sequence Listing. Plant Expression vectors that have been generated are summarized in the following table and more detailed description are provided below.

TABLE 23
Summary of Plant Expression Vectors

| Construct | | | | Description of the |
|---|---|---|---|---|
| Name | Class | Construct Description | Selection | included sequence |
| pMEN001 | 35S | 35S::MCS::Nos | prNOS::NPTII::Nos | T-DNA segment |
| | expression | | | (SEQ ID NO: 901) |
| | vector | | | |
| pMEN20 | 35S | 35S::MCS::E9 | 35S::NPTII::Nos | 35S::MCS::E9 |
| | expression | | | (SEQ ID NO: 902) |
| | vector | | | |
| pMEN65 | 35S | 35S::MCS::E9 | prNOS::NPTII::Nos | T-DNA segment |
| | expression | | | (SEQ ID NO: 903) |
| | vector | | | |
| pMEN1963 | 35S | 35S::attR1::CAT::ccdB::attR2:: | prNOS::NPTII::Nos | T-DNA segment |
| | expression | E9 | | (SEQ ID NO: 904) |
| | vector | | | |
| P5360 | 35S | 35S::MCS::E9 | 35S::NPmito::Sulf:: | T-DNA segment |
| | expression | | Nos | (SEQ ID NO: 905) |
| | vector | | | |
| P5375 | 2-component | MCS::m35S::oEnh::LexAGal4:: | 35S::NPTII::Nos | MCS::m35S::oEnh:: |
| (pMEN48) | driver vector | E9 (opLexA::GFP::E9) | | LexAGal4 |
| | | | | (SEQ ID NO: 906) |
| P5386 | 2-component | 35S::oEnh::LexAGal4::E9 | 35S::NPTII::Nos | 35S::oEnh::LexAGal4 |
| (pMEN57) | driver vector | (opLexA::GFP::E9) | | (SEQ ID NO: 907) |
| P5381 | 2-component | opLexA::MCS::E9 | 35S::NPmito::Sulf:: | opLexA::MCS |
| (pMEN53) | target vector | | Nos | (SEQ ID NO: 908) |
| P5480 | 2-component | opLexA::attR1::CAT::ccdB:: | 35S::NPmito::Sulf:: | opLexA::attR1::CAT:: |
| (pMEN256) | target vector | attR2::E9 | Nos | ccdB::attR2::E9 |
| | | | | (SEQ ID NO: 909) |
| P25420 | 2-component | opLexA::MCS::(9A)TAP::E9 | 35S::NPmito::Sulf:: | MCS::(9A)TAP |
| | target vector | | Nos | (SEQ ID NO: 910) |
| P25976 | 2-component | opLexA::12xHA(10A)::MCS:: | 35S::NPmito::Sulf:: | 12xHA(10A)::MCS |
| | target vector | E9 | Nos | (SEQ ID NO: 911) |
| P25461 | 2-component | opLexA::MCS::(10A)12xHA:: | 35S::NPmito::Sulf:: | MCS::(10A)12xHA |
| | target vector | E9 | Nos | (SEQ ID NO: 912) |
| P21171 | GR fusion | 35S::MCS::GR::E9 | prNOS::NPTII::Nos | MCS::GR |
| | vector | | | (SEQ ID NO: 913) |
| P21173 | GR fusion | 35S::GR::MCS::E9 | prNOS::NPTII::Nos | GR::MCS |
| | vector | | | (SEQ ID NO: 914) |
| P21172 | GR-HA | 35S::MCS::GR::6xHA::E9 | prNOS::NPTII::Nos | MCS::GR::6xHA |
| | fusion | | | (SEQ ID NO: 915) |
| | vector | | | |
| P21174 | GR-HA | 35S::GR::MCS::6xHA::E9 | prNOS::NPTII::Nos | GR::MCS::6xHA |
| | fusion | | | (SEQ ID NO: 916) |
| | vector | | | |
| P5425 | GAL4 fusion | 35S::G40::GAL4 | prNOS::NPTII::Nos | G40::GAL4 |
| (pMEN201) | vector | | | (SEQ ID NO: 917) |
| P21195 | GAL4 fusion | 35S::Gal4::MCS::E9 | prNOS::NPTII::Nos | Gal4::MCS |
| | vector | | | (SEQ ID NO: 918) |
| P21378 | GAL4 fusion | 35S::MCS::Gal4::E9 | prNOS::NPTII::Nos | MCS::Gal4 |
| | vector | | | (SEQ ID NO: 919) |
| P25799 | GFP fusion | 35S::MCS::GFP::E9 | prNOS::NPTII::Nos | MCS::GFP |
| | vector | | | (SEQ ID NO: 920) |
| P25801 | CFP fusion | 35S::MCS::(9A)CFP::E9 | prNOS::NPTII::Nos | MCS::(9A)CFP |
| | vector | | | (SEQ ID NO: 921) |
| P25800 | YFP fusion | 35S::MCS::(9A)YFP::E9 | prNOS::NPTII::Nos | MCS::(9A)YFP |
| | vector | | | (SEQ ID NO: 922) |
| P32122 | Promoter | MCS::GFP::E9 | prNOS::NPTII::Nos | MCS::GFP |
| | reporter | | | (SEQ ID NO: 923) |
| | vector | | | |
| P21142 | Promoter | MCS::intGUS::E9 | prNOS::NPTII::Nos | MCS::intGUS |
| | reporter | | | (SEQ ID NO: 924) |
| | vector | | | |
| P25755 | Promoter | MCS::YFPLTI6b::E9 | prNOS::NPTII::Nos | MCS::YFPLTI6b |
| | reporter | | | (SEQ ID NO: 925) |
| | vector | | | |
| P21103 | RNAi | 35S::MCS::PDK::MCS::E9 | prNOS::NPTII::Nos | MCS::PDK::MCS |
| | vector | | | (SEQ ID NO: 926) |

[0347] Table 24 Legend: 10A: 10× alanine spacer; 12×HA: twelve repeats of the HA epitope tag; attR1/attR2: Gateway recombination sequence; CAT: chloramphenicol resistance; ccdb: counter selectable marker; E9: E9 3-prime UTR; GR: glucocorticoid receptor; intGUS: GUS reporter gene with an intron; LexAGal4 DNA binding protein; MCS: multiple cloning site; Nos: Nopaline synthase 3-prime UTR; NPmito: mitochondrial targeting sequence; oEnh: Omega enhancer; prNOS: Nopaline synthase promoter; NPTII: Kanamycin resistance; YFP/CFP: GFP reporter protein variant; YFPLTI6b: YFP fusion for membrane localization

[0348] Other Construct Element Sequences, which may be found in the table below and in the Sequence Listing, include: the 35S promoter (35S), the NOS promoter (prNOS), the minimal 35S (m35S), the omega Enhancer (oEnh), the Nos terminator (Nos), the E9 terminator (E9), and the NPmito::Sulfonamide element.

TABLE 24

Other Construct Element Sequences

| | |
|---|---|
| Element | Sequence |

| | |
|---|---|
| 35S | gcggattccattgcccagctatctgtcactttattgtgaagatagtgaaaaagaaggtggctcctacaaatgccatcattgcgataaagga |
| promoter | aaggccatcgttgaagatgcctctgccgacagtggtcccaaagatggacccccacccacgaggagcatcgtggaaaaagaagacgttccaa |
| (35S) | ccacgtcttcaaagcaagtggattgatgtgatggtccgattgagacttttcaacaaagggtaatatccggaaacctcctcggattccattg |
| | cccagctatctgtcactttattgtgaagatagtggaaaaggaaggtggctcctacaaatgccatcattgcgataaaggaaaggccatcgtt |
| | gaagatgcctctgccgacagtggtcccaaagatggacccccacccacgaggagcatcgtggaaaaagaagacgttccaaccacgtcttcaa |
| | agcaagtggattgatgtgatatctccactgacgtaagggatgacgcacaatcccactatccttcgcaagacccttcctctatataaggaag |
| | ttcatttcatttggagaggacacgctga |
| NOS | tcgagatcatgagcggagaattaagggagtcacgttatgacccccgccgatgacgcgggacaagccgttttacgtttggaactgacagaac |
| promoter | cgcaacgttgaaggagccactcagccgcgggtttctggagtttaatgagctaagcacatacgtcagaaaccattattgcgcgttcaaaagt |
| (prNOS) | cgcctaaggtcactatcagctagcaaatatttcttgtcaaaaatgctccactgacgttccataaattcccctcggtatccaattagagtct |
| | catattcactctcaatccaaataatctgcaccggatctggatcgtttcgc |
| minimal | cgcaagacccttcctctatataaggaagttcatttcatttggagaggacacgctc |
| 35S | |
| (m355) | |
| omega | atttttacaacaattaccaacaacaacaaacaacaaacaacattacaattacatttacaattacca |
| Enhancer | |
| (oEnh) | |
| Nos | gcgggactctggggttcgaaatgaccgaccaagcgacgcccaacctgccatcacgagatttcgattccaccgccgccttctatgaaaggtt |
| terminator | gggcttcggaatcgttttccgggacgccggctggatgatcctccagcgcggggatctcatgctggagttcttcgcccacgggatctctgcg |
| (Nos) | gaacaggcggtcgaaggtgccgatatcattacgacagcaacggccgacaagcacaacgccacgatcctgagcgacaatatgatcgggcccg |
| | gcgtccacatcaacggcgtcggcggcgactgcccaggcaagaccgagatgcaccgcgatatcttgctgcgttcggatattttcgtggagtt |
| | cccgccacagacccggatgatccccgatcgttcaaacatttggcaataaagtttcttaagattgaatcctgttgccggtcttgcgatgatt |
| | atcatataatttctgttgaattacgttaagcatgtaataattaacatgtaatgcatgacgttatttatgagatgggtttttatgattagag |
| | tcccgcaattatacatttaatacgcgatagaaaacaaaatatagcgcgcaaactaggataaattatcgcgcgcggtgtcatctatgttact |
| | agatcggg |
| E9 | gatcctctagctagagctttcgttcgtatcatcggtttcgacaacgttcgtcaagttcaatgcatcagtttcattgcgcacacaccagaat |
| terminator | cctactgagtttgagtattatggcattgggaaaactgtttttcttgtaccatttgttgtgcttgtaatttactgtgttttttattcggttt |
| (E9) | tcgctatcgaactgtgaaatggaaatggatggagaagagttaatgaatgatatggtccttttgttcattctcaaattaatattatttgttt |
| | tttctcttatttgttgtgtgttgaatttgaaattataagagatatgcaaacattttgtttgagtaaaaatgtgtcaaatcgtggcctctaa |
| | tgaccgaagttaatatgaggagtaaaacacttgtagttgtaccattatgcttattcactaggcaacaaatatattttcagacctagaaaag |
| | ctgcaaatgttactgaatacaagtatgtcctcttgtgttttagacatttatgaactttcctttatgtaattttccagaatccttgtcagat |
| | tctaatcattgctttataattatagttatactcatggatttgtagttgagtatgaaaatattttttaatgcattttatgacttgccaattg |
| | attgacaacatgcatcaatcgacctgcagccactcgaagcggccggccgccac |
| NPmito::Sul | agctcatttttacaacaattaccaacaacaacaaacaacaaacaacattacaattacatttacaattatcgatggcttctcggaggcttct |
| fonamide | cgcctctctcctccgtcaatcggctcaacgtggcggcggtctaatttcccgatcgttaggaaactccatccctaaatccgcttcacgcgcc |
| | tcttcacgcgcatcccctaagggattcctcttaaaccgcgccgtacagtacgctacctccgcagcggcaccggcatctcagccatcaacac |
| | caccaaagtccggcagtgaaccgtccggaaaattaccgatgagttcaccggcgctggttcgatcggtgccatggataaatcgctcatcatt |
| | ttcggcatcgtcaacataacctcggacagtttctccgatggaggccggtatctggcgccagacgcagccattgcgcaggcgcgtaagctga |
| | tggccgagggggcagatgtgatcgacctcggtccggcatccagcaatcccgacgccgcgcctgtttcgtccgacacagaaatcgcgcgtat |
| | cgcgccggtgctggacgcgctcaaggcagatggcattcccgtctcgctcgacagttatcaacccgcgacgcaagcctatgccttgtcgcgt |
| | ggtgtggcctatctcaatgatattcgcggttttccagacgctgcgttctatccgcaattggcgaaatcatctgccaaactcgtcgttatgc |
| | attcggtgcaagacgggcaggcagatcggcgcgaggcacccgctggcgacatcatggatcacattgcggcgttctttgacgcgcgcatcgc |
| | ggcgctgacgggtgccggtatcaaacgcaaccgccttgtccttgatcccggcatggggttttttctgggggctgctcccgaaacctcgctc |
| | tcggtgctggcgcggttcgatgaattgcggctgcgcttcgatttgccggtgcttctgtctgtttcgcgcaaatcctttctgcgcgcgctca |
| | caggccgtggtccgggggatgtcggggccgcgacactcgctgcagagcttgccgccgccgcaggtggagctgacttcatccgcacacacga |
| | gccgcgccccttgcgcgacgggctggcggtattggcggcgctgaaagaaaccgcaaggattcgttaa |

### 35S Expression Vectors

[0349] pMEN001 is a derivative of pBI121 in which kanamycin resistance gene is driven by the Nos promoter. pMEN001 was used for the initial cloning of a number of Arabidopsis transcription factors. (Sequence of pMEN001 polylinker=SEQ ID NO: 901)

[0350] pMEN20 is an earlier version of pMEN65 in which the kanamycin resistance gene is driven by the 35S promoter rather than the nos promoter. It is the base vector for P5381, P5425, P5375, and some of the older Arabidopsis transcription factor overexpression constructs. (Sequence of pMEN20 polylinker=SEQ ID NO: 902)

[0351] pMEN65 is a derivative of pMON10098. The only differences between pMEN65 and pMON10098 are the polylinker and the fact that the kanamycin gene is driven by the nos promoter. pMEN65 is the base vector for the majority of the transcription factor overexpression clones. (Sequence of pMEN65=SEQ ID NO: 903);

| pMEN65 primers: | |
|---|---|
| 35S | gcaagtggattgatgtgatatc |
| O5183 | tttggagaggacacgctgacaa |
| O6344 | atccggtacgaggcctgtctagag |
| E9 | caaactcagtaggattctggtgtgt |

```
pMEN65 polylinker:
                                  gcaagtggattgatgtgatatc->primer 35S
CCAACCACGTCTTCAAAGCAAGTGGATTGATGTGATATCTCCACTGACGTAAGGGATGACGCACAATCCCACTATCCTTCGCAAGAC
CCT
GGTTGGTGCAGAAGTTTCGTTCACCTAACTACACTATAGAGGTGACTGCATTCCCTACTGCGTGTTAGGGTGATAGGAAGCGTTCTG
GGA
                                                    tttggagaggacacgctgacaa->primer O5183
TCCTCTATATAAGGAAGTTCATTTCATTTGGAGAGGACACGCTGACAAGCTGACTCTAGCAGATCTGGTACCGTCGACGGTGAGCTC
CGC
AGGAGATATATTCCTTCAAGTAAAGTAAACCTCTCCTGTGCGACTGTTCGACTGAGATCGTCTAGACCATGGCAGCTGCCACTCGAG
GCG
                                                                                                              --------pMEN65 MCS------------
GGCCGCTCTAGACAGGCCTCGTACCGGATCCTCTAGCTAGAGCTTTCGTTCGTATCATCGGTTTCGACAACGTTCGTCAAGTTCAAT
GCA
CCGGCGAGATCTGTCCGGAGCATGGCCTAGGAGATCGATCTCGAAAGCAAGCATAGTAGCCAAAGCTGTTGCAAGCAGTTCAAGTTA
CGT
      <-gagatctgtccggagcatggccta primer O6344
TCAGTTTCATTGCGCACACACCAGAATCCTACTGAGTTTGAGTATTATGGCATT
AGTCAAAGTAACGCGTGTGTGGTCTTAGGATGACTCAAACTCATAATACCGTAA
                          <-tgtgtggtcttaggatgactcaaac primer E9
```

[0352] pMEN1963 is a derivative of pMEN65 with Gateway attR sites flanking the ccdB gene, a counter-selectable marker. This vector is used to receive an insert flanked by attL sites from a Gateway entry clone. It was the base vector for many of the Arabidopsis transcription factor overexpression clones. Sequence of pMEN1963 SEQ ID NO: 904)

[0353] P5360 is a derivative of pMEN65 in which the kanamycin resistance gene was replaced by a mitochondrial-targeted sulfonamide resistance gene. Sequence of P5360=SEQ ID NO: 905)

### Two-Component Vectors

[0354] P5375 (also called pMEN48) is the 2-component base vector used to express the LexA:GAL4 chimeric activator under different promoters. It contains a multiple cloning site in front of the LexA:GAL4 gene, followed by the GFP reporter gene under the control of the LexA operator. It has a pMEN20 backbone, and carries kanamycin resistance under the 35S promoter. (Sequence of P5375 insert=SEQ ID NO: 906)

[0355] P5386 (also called pMEN57) is a derivative of P5375 in which the 35S promoter from pBI121 is cloned into the HindIII and NotI sites of p5375. It drives expression of the LexA:GAL4 activator under the 35S promoter. (Sequence of P5386 insert=SEQ ID NO: 907)

[0356] P5381 (also called pMEN53) is the 2-component base vector that was used to express genes under the control of the LexA operator. It contains eight tandem LexA operators from plasmid p8op-lacZ (Clontech) followed by a polylinker. The plasmid carries a sulfonamide resistance gene driven by the 35S promoter. (Sequence of P5381 LexAOp and polylinker regions=SEQ ID NO: 908)

[0357] P5480 (also called pMEN256) is a derivative of P5381 in which the multiple cloning site is replaced with Gateway attR sites flanking the ccdB gene. This vector was used to receive an insert flanked by attL sites from a Gateway entry clone. (Sequence of P5480 (pMEN256) (opLexA::attR1::CAT::ccdB::attR2::E9)=SEQ ID NO: 909)

[0358] P25420 is the based vector for the development of C-term TAP fusion. The vector includes a 10-alanine spacer segment between the gene of interest and the TAP element. This is a 2-component vector with the LexA operator. (Sequence of P25420 insert=SEQ ID NO: 910)

[0359] P25976 is the based vector for the development of N-term TAP fusion. The vector includes a 10-alanine spacer segment between the gene of interest and the TAP element. This is a 2-component vector with the LexA operator (Sequence of P25976 insert=SEQ ID NO: 911)

[0360] P25461 is the based vector for the development of C-term 12×HA fusion. The vector includes a 10-alanine spacer segment between the gene of interest and the 12×HA element. This is a 2-component vector with the LexA operator. (Sequence of P25461 insert=SEQ ID NO: 912)

### Fusion Vectors

[0361] P21171 is the backbone vector for creation of C-terminal glucocorticoid receptor fusion constructs. The GR hormone binding domain minus the ATG was amplified and cloned into pMEN65 with NotI and XbaI. To create gene fusions, the gene of interest was amplified using a 3′ primer that ends at the last amino acid codon before the stop codon. The PCR product can then be cloned into the SalI and NotI sites. (Sequence of P21171 GR coding sequence and polylinker=SEQ ID NO: 913)

[0362] P21173 is the backbone vector for creation of N-terminal glucocorticoid receptor fusion constructs. The GR hormone binding domain including the ATG was amplified and cloned into pMEN65 with BglII and KpnI. To create gene fusions, the gene of interest was amplified using a primer that starts at the second amino acid and has added the KpnI or SalI and NotI sites. The PCR product was then cloned into the KpnI or SalI and NotI sites of P21173, taking care to maintain the reading frame. (Sequence of P21173 GR coding sequence and polylinker ═SEQ ID NO: 914)

[0363] P21172 is the based vector for the development of N-terminal glucocorticoid receptor fusion constructs with an N-terminal HA epitope tag. (Sequence of P21172 insert=SEQ ID NO: 915)

[0364] P21174 is the based vector for the development of C-terminal glucocorticoid receptor fusion constructs with an N-terminal HA epitope tag. (Sequence of P21174 insert=SEQ ID NO: 916)

[0365] P21195 is the backbone vector for creation of N-terminal GAL4 activation domain protein fusions. It was created by inserting the GAL4 activation domain into the BglII and KpnI sites of pMEN65. To create gene fusions, the gene of interest was amplified using a primer that starts at the second amino acid and has added the KpnI or SalI and NotI sites. The PCR product was then cloned into the KpnI or SalI and NotI sites of P21195, taking care to maintain the reading frame. (Sequence of P21195 GAL4 activation domain and polylinker=SEQ ID NO: 918)

[0366] P21378 was constructed to serve as a backbone vector for creation of C-terminal GAL4 activation domain fusions. However, P5425 (see below) was also used as a backbone construct. P21378 was constructed by amplification of the GAL4 activation domain and insertion of this domain into the NotI and XbaI sites of pMEN65. To create gene fusions, the gene of interest was amplified using a 3′ primer that ends at the last amino acid codon before the stop codon. The PCR product can then be cloned into the SalI and NotI sites. (Sequence of P21378 GAL4 activation domain and polylinker=SEQ ID NO: 919)

[0367] P5425 (also called pMEN201) is a derivative of pMEN20 that carries a CBF1:GAL4 fusion. To construct other GAL4 fusions, the CBF1 gene was removed with SalI or Kpn1 and EcoRI. The gene of interest was amplified using a 3′ primer that ended at the last amino acid codon before the stop codon and contained an EcoRI or Mfe1 site. The product was inserted into these SalI or KpnI and EcoRI sites, taking care to maintain the reading frame. (Sequence of P5425 (pMEN201)=SEQ ID NO: 917)

[0368] P25799 is the based vector for the development of C-terminal GFP fusion constructs. (Sequence of P25799 insert=SEQ ID NO: 920)

[0369] P25801 is the based vector for the development of C-terminal CFP fusion constructs. The vector includes a 10-alanine spacer segment between the gene of interest and the CFP element. (Sequence of P25801 insert=SEQ ID NO: 921)

[0370] P25800 is the based vector for the development of C-terminal YFP fusion constructs. The vector includes a 10-alanine spacer segment between the gene of interest and the YFP element. (Sequence of P25800 insert=SEQ ID NO: 922)

### Promoter-Reporter Vectors

[0371] P32122 is the based vector for the development of GFP reporter constructs. (Sequence of P32122 insert=SEQ ID NO: 923)

[0372] P21142 is the based vector for the development of GUS reporter constructs. (Sequence of P21142 insert SEQ ID NO: 924)

[0373] P25755 is the based vector for the development of membrane-anchored YFP reporter constructs. (Sequence of P25755 insert=SEQ ID NO: 925)

### RNAi Vector

[0374] P21103 is the backbone vector for the creation of RNAi constructs. The PDK intron from pKANNIBAL (Wesley et al. (2001)) was amplified and cloned into the SalI and NotI sites of pMEN65. An EcoRI site was included in the 5′ primer between the SalI site and the Pdk intron sequence. RNAi constructs were generated as follows:

[0375] The target sequence was amplified with primers with the following restriction sites:

[0376] 5′ primer: BamHI and SalI

[0377] 3′ primer: XbaI and EcoRI

[0378] A sense fragment was inserted in front of the Pdk intron using SalI and EcoRI to generate an intermediate vector.

[0379] The same fragment was then subcloned into the intermediate vector behind the PDK intron in the antisense orientation using XbaI and EcoRI.

[0380] Target sequences were selected to be 100 bp long or longer. For constructs designed against a clade rather than a single gene, the target sequences have at least 85% identity to all clade members. Where it is not possible to identity a single 100 bp sequence with 85% identity to all clade members, hybrid fragments composed of two shorter sequences were used. Sequence of P21103 polylinker and PDK intron=SEQ ID NO: 926)

[0381] Cloning methods. The sequence of each clone used in this report is presented with the results of the phenotypic screens, or in an appendix in the case of clones used in the TFSeeker™ assay.

[0382] Arabidopsis transcription factor clones used in this report were created in one of three ways: isolation from a library, amplification from cDNA, or amplification from genomic DNA. The ends of the Arabidopsis transcription factor coding sequences were generally confirmed by RACE PCR or by comparison with public cDNA sequences before cloning.

[0383] Clones of transcription factor orthologs from rice, maize, and soybean presented in this report were all made by amplification from cDNA. The ends of the coding sequences were predicted based on homology to Arabidopsis or by comparison to public and proprietary cDNA sequences; RACE PCR was not done to confirm the ends of the coding sequences. For cDNA amplification, we used KOD Hot Start DNA Polymerase (Novagen), in combination with 1M betaine and 3% DMSO. This protocol was found to be successful in amplifying cDNA from GC-rich species such as rice and corn, along with some non-GC-rich species such as soybean and tomato, where traditional PCR protocols failed. Primers were designed using at least 30 bases specific to the target sequence, and were designed close to, or overlapping, the start and stop codons of the predicted coding sequence.

[0384] Clones were fully sequenced. In the case of rice, high-quality public genomic sequences were available for comparison, and clones with sequence changes that result in changes in amino acid sequence of the encoded protein were rejected. For corn and soy, however, it was often unclear whether sequence differences represent an error or polymorphism in the source sequence or a PCR error in the clone. Therefore, in the cases where the sequence of the clone we obtained differed from the source sequence, a second clone was created from an independent PCR reaction. If the sequences of the two clones agreed, then the clone was accepted as a legitimate sequence variant.

[0385] Transformation. Agrobacterium strain ABI was used for all plant transformations. This strain is chloramphenicol, kanamycin and gentamicin resistant.

### Example IV

### GR Line Analysis

[0386] A one- or two-component approach was used to generate dexamethasone inducible lines used, as detailed below.

[0387] One-component dex-inducible lines. In the one-component system, direct-GR fusion constructs are made for overexpression of a TF with a glucocorticoid receptor fusion at either its N or C terminal end.

[0388] Two-component dex-inducible lines. For the two component strategy, a kanamycin resistant 35S::LexA-GAL4-TA driver line was established and was then supertransformed with opLexA::TF constructs (carrying a sulfonamide resistance gene) for each of the transcription factors of interest.

[0389] Establishment of the 35S::LexA-GAL4-TA driver line. Approximately one hundred 35S::LexA-GAL4-TA independent driver lines containing construct pMEN262 (also known as P5486) were generated at the outset of the experiment. Primary transformants were selected on kanamycin plates and screened for GFP fluorescence at the seedling stage. Any lines that showed constitutive GFP activity were discarded. At 10 days, lines that showed no GFP activity were then transferred onto MS agar plates containing dexamethasone (5 μM). Lines were that showed strong GFP activation by 2-3 days following the dexamethasone treatments were marked for follow-up in the T2 generation. Following similar experiments in the T2 generation, a single line, 65, was selected for future studies. Line 66 lacked any obvious background expression and all plants showed strong GFP fluorescence following dexamethasone application. A homozygous population for line 65 was then obtained, re-checked to ensure that it still exhibited induction following dexamethasone application, and bulked. 35S::LexA-GAL4-TA line 65 was also crossed to an opLexA::GUS line to demonstrate that it could drive activation of targets arranged in trans.

### Example V

### Transformation

[0390] Transformation of Arabidopsis was performed by an Agrobacterium-mediated protocol based on the method of Bechtold and Pelletier (1998). Unless otherwise specified, all experimental work was done using the Columbia ecotype.

[0391] Plant preparation. Arabidopsis seeds were sown on mesh covered pots. The seedlings were thinned so that 6-10 evenly spaced plants remained on each pot 10 days after planting. The primary bolts were cut off a week before transformation to break apical dominance and encourage auxiliary shoots to form. Transformation was typically performed at 4-5 weeks after sowing.

[0392] Bacterial culture preparation. Agrobacterium stocks were inoculated from single colony plates or from glycerol stocks and grown with the appropriate antibiotics and grown until saturation. On the morning of transformation, the saturated cultures were centrifuged and bacterial pellets were re-suspended in Infiltration Media (0.5×MS, 1×B5 Vitamins, 5% sucrose, 1 mg/ml benzylaminopurine riboside, 200 μl/L Silwet L77) until an A600 reading of 0.8 is reached.

[0393] Transformation and seed harvest. The Agrobacterium solution was poured into dipping containers. All flower buds and rosette leaves of the plants were immersed in this solution for 30 seconds. The plants were laid on their side and wrapped to keep the humidity high. The plants were kept this way overnight at 4° C. and then the pots were turned upright, unwrapped, and moved to the growth racks.

[0394] The plants were maintained on the growth rack under 24-hour light until seeds were ready to be harvested. Seeds were harvested when 80% of the siliques of the transformed plants are ripe (approximately 5 weeks after the initial transformation). This seed was deemed T0 seed, since it was obtained from the T0 generation, and was later plated on selection plates (either kanamycin or sulfonamide, see Example VI). Resistant plants that were identified on such selection plates comprised the T1 generation.

### Example VI

### Morphology

[0395] Morphological analysis was performed to determine whether changes in transcription factor levels affect plant growth and development. This was primarily carried out on the T1 generation, when at least 10-20 independent lines were examined. However, in cases where a phenotype required confirmation or detailed characterization, plants from subsequent generations were also analyzed.

[0396] Primary transformants were selected on MS medium with 0.3% sucrose and 50 mg/l kanamycin. T2 and later generation plants were selected in the same manner, except that kanamycin was used at 35 mg/l. In cases where lines carry a sulfonamide marker (as in all lines generated by super-transformation), seeds were selected on MS medium with 0.3% sucrose and 1.5 mg/l sulfonamide. KO lines were usually germinated on plates without a selection. Seeds were cold-treated (stratified) on plates for 3 days in the dark (in order to increase germination efficiency) prior to transfer to growth cabinets. Initially, plates were incubated at 22° C. under a light intensity of approximately 100 microEinsteins for 7 days. At this stage, transformants were green, possessed the first two true leaves, and were easily distinguished from bleached kanamycin from bleached kanamycin or sulfonamide-susceptible seedlings. Resistant seedlings were then transferred onto soil (Sunshine potting mix). Following transfer to soil, trays of seedlings were covered with plastic lids for 2-3 days to maintain humidity while they became established. Plants were grown on soil under fluorescent light at an intensity of 70-95 microEinsteins and a temperature of 18-23° C. Light conditions consisted of a 24-hour photoperiod unless otherwise stated. In instances where alterations in flowering time was apparent, flowering may was re-examined under both 12-hour and 24-hour light to assess whether the phenotype was photoperiod dependent. Under our 24-hour light growth conditions, the typical generation time (seed to seed) was approximately 14 weeks.

[0397] Because many aspects of Arabidopsis development are dependent on localized environmental conditions, in all cases plants were evaluated in comparison to controls in the same flat. As noted below, controls for transgenic lines were wild-type plants, plants overexpressing CBF4, or transgenic plants harboring an empty transformation vector selected on kanamycin or sulfonamide. Careful examination was made at the following stages: seedling (1 week), rosette (2-3 weeks), flowering (4-7 weeks), and late seed set (8-12 weeks). Seed was also inspected. Seedling morphology was assessed on selection plates. At all other stages, plants were macroscopically evaluated while growing on soil. All significant differences (including alterations in growth rate, size, leaf and flower morphology, coloration and flowering time) were recorded, but routine measurements were not be taken if no differences were apparent. In certain cases, stem sections were stained to reveal lignin distribution. In these instances, hand-sectioned stems were mounted in phloroglucinol saturated 2M HCl (which stains lignin pink) and viewed immediately under a dissection microscope.

[0398] Note that for a given project (gene-promoter combination, GAL4 fusion lines, RNAi lines etc.), ten lines were typically examined in subsequent plate based physiology assays.

### Example VII

### Physiology Experimental Methods

[0399] Plate Assays. Twelve different plate-based physiological assays (shown below), representing a variety of drought-stress related conditions, were used as a pre-screen to identify top performing lines from each project (i.e. lines from transformation with a particular construct), that may be tested in subsequent soil based assays. Typically, ten lines were subjected to plate assays, from which the best three lines were selected for subsequent soil based assays. However, in projects where significant stress tolerance was not obtained in plate based assays, lines were not submitted for soil assays.

[0400] In addition, some projects were subjected to nutrient limitation studies. A nutrient limitation assay was intended to find genes that allow more plant growth upon deprivation of nitrogen. Nitrogen is a major nutrient affecting plant growth and development that ultimately impacts yield and stress tolerance. These assays monitor primarily root but also rosette growth on nitrogen deficient media. In all higher plants, inorganic nitrogen is first assimilated into glutamate, glutamine, aspartate and asparagine, the four amino acids used to transport assimilated nitrogen from sources (e.g. leaves) to sinks (e.g. developing seeds). This process is regulated by light, as well as by C/N metabolic status of the plant. We used a C/N sensing assay to look for alterations in the mechanisms plants use to sense internal levels of carbon and nitrogen metabolites which could activate signal transduction cascades that regulate the transcription of N-assimilatory genes. To determine whether these mechanisms are altered, we exploited the observation that wild-type plants grown on media containing high levels of sucrose (3%) without a nitrogen source accumulate high levels of anthocyanins. This sucrose induced anthocyanin accumulation can be relieved by the addition of either inorganic or organic nitrogen. We used glutamine as a nitrogen source since it also serves as a compound used to transport N in plants.

[0401] Germination assays. NaCl (150 mM), mannitol (300 mM), sucrose (9.4%), ABA (0.3 μM), Heat (32° C.), Cold (8° C.), —N is basal media minus nitrogen plus 3% sucrose and —N/+Gln is basal media minus nitrogen plus 3% sucrose and 1 mM glutamine.

[0402] Growth assays. Growth assays consisted of severe dehydration (plate-based desiccation or drought), heat (32° C. for 5 days followed by recovery at 22° C.), chilling (8° C.), root development (visual assessment of lateral and primary roots, root hairs and overall growth). For the nitrogen limitation assay, all components of MS medium remained constant except nitrogen was reduced to 20 mg/L of NH₄NO₃. Note that 80% MS had 1.32 g/L NH₄NO₃ and 1.52 g/L KNO₃.

[0403] Unless otherwise stated, all experiments were performed with the Arabidopsis thaliana ecotype Columbia (col-0). Assays were usually performed on non-selected segregating T2 populations (in order to avoid the extra stress of selection). Control plants for assays on lines containing direct promoter-fusion constructs were Col-0 plants transformed an empty transformation vector (pMEN65). Controls for 2-component lines (generated by supertransformation) were the background promoter-driver lines (i.e. promoter::LexA-GAL4TA lines), into which the supertransformations were initially performed.

[0404] All assays were performed in tissue culture. Growing the plants under controlled temperature and humidity on sterile medium produced uniform plant material that had not been exposed to additional stresses (such as water stress) which could cause variability in the results obtained. All assays were designed to detect plants that were more tolerant or less tolerant to the particular stress condition and were developed with reference to the following publications: Jang et al. (1997), Smeekens (1998), Liu and Zhu (1997), Saleki et al. (1993), Wu et al. (1996), Zhu et al. (1998), Alia et al. (1998), Xin and Browse, (1998), Leon-Kloosterziel et al. (1996). Where possible, assay conditions were originally tested in a blind experiment with controls that had phenotypes related to the condition tested.

### Procedures

[0405] Prior to plating, seed for all experiments were surface sterilized in the following manner: (1) 5 minute incubation with mixing in 70% ethanol, (2) 20 minute incubation with mixing in 30% bleach, 0.01% triton-X 100, (3) 5× rinses with sterile water, (4) Seeds were re-suspended in 0.1% sterile agarose and stratified at 4° C. for 3-4 days.

[0406] All germination assays follow modifications of the same basic protocol. Sterile seeds were sown on the conditional media that had a basal composition of 80% MS+Vitamins. Plates were incubated at 22° C. under 24-hour light (120-130 μE m⁻² s⁻¹) in a growth chamber. Evaluation of germination and seedling vigor was performed 5 days after planting. For assessment of root development, seedlings germinated on 80% MS+Vitamins+1% sucrose were transferred to square plates at 7 days. Evaluation was done 5 days after transfer following growth in a vertical position. Qualitative differences were recorded including lateral and primary root length, root hair number and length, and overall growth.

[0407] For chilling (8° C.) and heat sensitivity (32° C.) growth assays, seeds were germinated and grown for 7 days on MS+Vitamins+1% sucrose at 22° C. and then were transferred to chilling or heat stress conditions. Heat stress was applied for 5 days, after which the plants were transferred back to 22° C. for recovery and evaluated after a further 5 days. Plants were subjected to chilling conditions (8° C.) and evaluated at 10 days and 17 days.

[0408] For plate-based severe dehydration assays (sometimes referred to as desiccation assays), seedlings were grown for 14 days on MS+ Vitamins+1% Sucrose at 22° C. Plates were opened in the sterile hood for 3 hr for hardening and then seedlings were removed from the media and dried for 2 h in the hood. After this time they were transferred back to plates and incubated at 22° C. for recovery. Plants were evaluated after another 5 days.

### Data Interpretation

[0409] At the time of evaluation, plants were given one of the following scores:
[0410] (++) Substantially enhanced performance compared to controls. The phenotype was very consistent and growth was significantly above the normal levels of variability observed for that assay.
[0411] (+) Enhanced performance compared to controls. The response was consistent but was only moderately above the normal levels of variability observed for that assay.
[0412] (wt) No detectable difference from wild-type controls.
[0413] (−) Impaired performance compared to controls. The response was consistent but was only moderately above the normal levels of variability observed for that assay.
[0414] (−−) Substantially impaired performance compared to controls. The phenotype was consistent and growth was significantly above the normal levels of variability observed for that assay.
[0415] (n/d) Experiment failed, data not obtained, or assay not performed.

### Example VII

### Soil Drought (Clay Pot)

[0416] The soil drought assay (performed in clay pots) was based on that described by Haake et al. (2002). Experimental Procedure.

[0417] Previously, we performed clay-pot assays on segregating T2 populations, sown directly to soil. However, in the current procedure, seedlings were first germinated on selection plates containing either kanamycin or sulfonamide.

[0418] Seeds were sterilized by a 2 minute ethanol treatment followed by 20 minutes in 30% bleach/0.01% Tween and five washes in distilled water. Seeds were sown to MS agar in 0.1% agarose and stratified for 3 days at 4° C., before transfer to growth cabinets with a temperature of 22° C. After 7 days of growth on selection plates, seedlings were transplanted to 3.5 inch diameter clay pots containing 80 g of a 50:50 mix of vermiculite:perlite topped with 80 g of ProMix. Typically, each pot contains 14 seedlings, and plants of the transgenic line being tested are in separate pots to the wild-type controls. Pots containing the transgenic line versus control pots were interspersed in the growth room, maintained under 24-hour light conditions (18-23° C., and 90-100 μE m⁻² s⁻¹) and watered for a period of 14 days. Water was then withheld and pots were placed on absorbent paper for a period of 8-10 days to apply a drought treatment. After this period, a visual qualitative “drought score” from 0-6 was assigned to record the extent of visible drought stress symptoms. A score of “6” corresponded to no visible symptoms whereas a score of “0” corresponded to extreme wilting and the leaves having a “crispy” texture. At the end of the drought period, pots were re-watered and scored after 5-6 days; the number of surviving plants in each pot was counted, and the proportion of the total plants in the pot that survived was calculated.

[0419] Split-pot method. A variation of the above method was sometimes used, whereby plants for a given transgenic line were compared to wild-type controls in the same pot. For those studies, 7 wild-type seedlings were transplanted into one half of a 3.5 inch pot and 7 seedlings of the line being tested were transplanted into the other half of the pot.

[0420] Analysis of results. In a given experiment, we typically compared 6 or more pots of a transgenic line with 6 or more pots of the appropriate control. (In the split pot method, 12 or more pots are used.) The mean drought score and mean proportion of plants surviving (survival rate) were calculated for both the transgenic line and the wild-type pots. In each case a p-value* was calculated, which indicated the significance of the difference between the two mean values. The results for each transgenic line across each planting for a particular project were then presented in a results table.

[0421] Calculation of p-values. For the assays where control and experimental plants were in separate pots, survival was analyzed with a logistic regression to account for the fact that the random variable was a proportion between 0 and 1. The reported p-value was the significance of the experimental proportion contrasted to the control, based upon regressing the logit-transformed data.

[0422] Drought score, being an ordered factor with no real numeric meaning, was analyzed with a non-parametric test between the experimental and control groups. The p-value was calculated with a Mann-Whitney rank-sum test.

[0423] For the split-pot assays, matched control and experimental measurements were available for both variables. In lieu of a direct transformed regression technique for these data, the logit-transformed proportions were analyzed by parametric methods. The p-value was derived from a paired-t-test on the transformed data. For the paired score data, the p-value from a Wilcoxon test was reported.

### Example IX

### Soil Drought (Single Pot)

[0424] These experiments determined the physiological basis for the drought tolerance conferred by each lead and were typically performed under soil grown conditions. Usually, the experiment was performed under photoperiodic conditions of 10-hr or 12-hr light. Where possible, a given project (gene/promoter combination or protein variant) was represented by three independent lines. Plants were usually at late vegetative/early reproductive stage at the time measurements were taken. Typically we assayed three different states: a well-watered state, a mild-drought state and a moderately severe drought state. In each case, we made comparisons to wild-type plants with the same degree of physical stress symptoms (wilting). To achieve this, staggered samplings were often required. Typically, for a given line, ten individual plants were assayed for each state.

[0425] The following physiological parameters were routinely measured: relative water content, ABA content, proline content, and photosynthesis rate. In some cases, measurements of chlorophyll levels, starch levels, carotenoid levels, and chlorophyll fluorescence were also made.

[0426] Analysis of results. In a given experiment, for a particular parameter, we typically compared about 10 samples from a given transgenic line with about 10 samples of the appropriate wild-type control at each drought state. The mean values for each physiological parameter were calculated for both the transgenic line and the wild-type pots. In each case, a P-value (calculated via a simple t-test) was determined, which indicated the significance of the difference between the two mean values. The results for each transgenic line across each planting for a particular project were then presented in a results table.

[0427] A typical procedure is described below; this corresponds to method used for the drought time-course experiment which we performed on wild-type plants during our baseline studies at the outset of the drought program.

[0428] Procedure. Seeds were stratified for 3 days at 4° C. in 0.1% agarose and sown on Metronmix 200 in 2.25 inch pots (square or round). Plants were maintained in individual pots within flats grown under short days (10:14 L:D). Seeded were watered as needed to maintain healthy plant growth and development. At 7 to 8 weeks after planting, plants were used in drought experiments.

[0429] Plants matched for equivalent growth development (rosette size) were removed from plastic flats and placed on absorbent paper. Pots containing plants used as well-watered controls were placed within a weigh boat and the dish placed on the absorbent paper. The purpose of the weigh boat was to retain any water that might leak from well-watered pots and affect pots containing plants undergoing the drought stress treatment.

[0430] On each day of sampling, up to 18 droughted plants and 6 well-watered controls (from each transgenic line) were picked from a randomly generated pool (given that they passed quality control standards). Biochemical analysis for photosynthesis, ABA, and proline was performed on the next three youngest, most fully expanded leaves. Relative water content was analyzed using the remaining rosette tissue.

### Example X

### Soil Drought (Biochemical and Physiological Assays)

[0431] Background. The purpose of these measurements was to determine the physiological state of plants in soil drought experiments.

[0432] Measurement of Photosynthesis. Photosynthesis was measured using a LICOR LI-6400. The LI-6400 uses infrared gas analyzers to measure carbon dioxide to generate a photosynthesis measurement. This method is based upon the difference of the CO₂ reference (the amount put into the chamber) and the CO₂ sample (the amount that leaves the chamber). Since photosynthesis is the process of converting CO₂ to carbohydrates, we expected to see a decrease in the amount of CO₂ sample. From this difference, a photosynthesis rate can be generated. In some cases, respiration may occur and an increase in CO₂ detected. To perform measurements, the L1-6400 was set-up and calibrated as per L1-6400 standard directions. Photosynthesis was measured in the youngest most fully expanded leaf at 300 and 1000 ppm CO₂ using a metal halide light source. This light source provided about 700 μE m⁻² s⁻¹.

[0433] Fluorescence was measured in dark and light adapted leaves using either a L1-6400 (LICOR) with a leaf chamber fluorometer attachment or an OS-1 (Opti-Sciences) as described in the manufacturer's literature. When the LI-6400 was used, all manipulations were performed under a dark shade cloth. Plants were dark adapted by placing in a box under this shade cloth until used. The OS-30 utilized small clips to create dark adapted leaves.

[0434] Measurement of Abscisic Acid and Proline. The purpose of this experiment was to measure ABA and proline in plant tissue. ABA is a plant hormone believed to be involved in stress responses and proline is an osmoprotectant.

[0435] Three of the youngest, most fully expanded mature leaves were harvested, frozen in liquid nitrogen, lyophilized, and a dry weight measurement taken. Plant tissue was then homogenized in methanol to which 500 ng of d6-ABA had been added to act as an internal standard. The homogenate was filtered to removed plant material and the filtrate evaporated to a small volume. To this crude extract, approximately 3 ml of 1% acetic acid was added and the extract was further evaporated to remove any remaining methanol. The volume of the remaining aqueous extract was measured and a small aliquot (usually 200 to 500 μl) removed for proline analysis (Protocol described below). The remaining extract was then partitioned twice against ether, the ether removed by evaporation and the residue methylated using ethereal diazomethane. Following removal of any unreacted diazomethane, the residue was dissolved in 100 to 200 μl ethyl acetate and analyzed by gas chromatography-mass spectrometry. Analysis was performed using an HP 6890 GC coupled to an HP 5973 MSD using a DB-5 ms gas capillary column. Column pressure was 20 psi. Initially, the oven temperature was 150° C. Following injection, the oven was heated at 5° C./min to a final temperature of 250° C. ABA levels were estimated using an isotope dilution equation and normalized to tissue dry weight.

[0436] Free proline content was measured according to Bates (Bates et al., 1973). The crude aqueous extract obtained above was brought up to a final volume of 500 μl using distilled water. Subsequently, 500 μl of glacial acetic was added followed by 500 μl of Chinard's Ninhydrin. The samples were then heated at 95 to 100° C. for 1 hour. After this incubation period, samples were cooled and 1.5 ml of toluene were added. The upper toluene phase was removed and absorbance measured at 515 nm. Amounts of proline were estimated using a standard curve generated using L-proline and normalized to tissue dry weight.

[0437] [n.b. Chinard's Ninhydrin was prepared by dissolving 2.5 g ninhydrin (triketohydrindene hydrate) in 60 ml glacial acetic acid at 70° C. to which 40 ml of 6 M phosphoric acid was added.]

[0438] Measurement of Relative Water Content (RWC). Relative Water Content (RWC) indicates the amount of water that is stored within the plant tissue at any given time. It was obtained by taking the field weight of the rosette minus the dry weight of the plant material and dividing by the weight of the rosette saturated with water minus the dry weight of the plant material. The resulting RWC value can be compared from plant to plant, regardless of plant size.

$$Relative Water Content = \frac{Field Weight - Dry Weight}{Turgid Weight - Dry Weight} \times 100$$

[0439] After tissue had been removed for array and ABA/proline analysis, the rosette was cut from the roots using a small pair of scissors. The field weight was obtained by weighing the rosette. The rosette was then immersed in cold water and placed in an ice water bath in the dark. The purpose of this was to allow the plant tissue to take up water while preventing any metabolism which could alter the level of small molecules within the cell. The next day, the rosette was carefully removed, blotted dry with tissue paper, and weighed to obtain the turgid weight. Tissue was then frozen, lyophilized, and weighed to obtain the dry weight.

[0440] Starch determination. Starch was estimated using a simple iodine based staining procedure. Young, fully expanded leaves were harvested either at the end or beginning of a 12 h light period and placed in tubes containing 80% ethanol or 100% methanol. Leaves were decolorized by incubating tubes in a 70 to 80 C water bath until chlorophyll had been removed from leaf tissue. Leaves were then immersed in water to displace any residual methanol which may be present in the tissue. Starch was then stained by incubating leaves in an iodine stain (2 g KI, 1 g I₂ in 100 ml water) for one min and then washing with copious amounts of water. Tissue containing large amounts of starch stained dark blue or black; tissues depleted in starch were colorless.

[0441] Chlorophyll/carotenoid determination. For some experiments, chlorophyll was estimated in methanolic extracts using the method of Porra et al. (1989). Carotenoids were estimated in the same extract at 450 nm using an A (1%) of 2500. We currently are measuring chlorophyll using a SPAD-502 (Minolta). When the SPAD-502 was being used to measure chlorophyll, both carotenoid and chlorophyll content and amount could also be determined via HPLC. Pigments were extracted from leave tissue by homogenizing leaves in acetone:ethyl acetate (3:2). Water was added, the mixture centrifuged, and the upper phase removed for HPLC analysis. Samples were analyzed using a Zorbax C18 (non-endcapped) column (250×4.6) with a gradient of acetonitrile:water (85:15) to acetonitrile:methanol (85:15) in 12.5 minutes. After holding at these conditions for two minutes, solvent conditions were changed to methanol:ethyl acetate (68:32) in two minutes.

[0442] Carotenoids and chlorophylls were quantified using peak areas and response factors calculated using lutein and beta-carotene as standards.

[0443] Quantification of protein level. Protein level quantification was performed for 35S::G481 and related projects. Plants were plated on selective MS media, and transplanted to vertical MS plates after one week of growth. After 17 days of growth (24 h light, 22 C), tissues were harvested from the vertical plates. The shoot tissue from 1 plant was harvested as one biological replicate for each line, and the root tissue from 2 plants were combined as 1 biological replicate. For each line analyzed, two biological replicates each of shoot and root tissue were analyzed. Whole cell protein extracts were prepared in a 96 well format and separated on a 4-20% SDS-PAGE gel, transferred to PVDF membrane for western blotting, and probed with a 1:2000 dilution of anti-G481 antibody in a 1% blocking solution in TBS-T. Protein levels for various samples were estimated by setting a level of one for pMEN65 wild type and three for line G481-6 to describe the amount of G481 protein visible on the blot. The protein level for each of the other lines tested was visually estimated on each blot relative to the pMEN65 and G481-6 standards.

[0444] Nuclear and cytoplasmically-enriched fractions. We developed a platform to prepare nuclear and cytoplasmic protein extracts in a 96-well format using a tungsten carbide beads for cell disruption in a mild detergent and a sucrose cushion to separate cytoplasmic from nuclear fractions. We used histone antibodies to demonstrate that this method effectively separated cytoplasmic from nuclear-enriched fractions. An alternate method (spun only) used the same disruption procedure, but simply pelleted the nuclei to separate them from the cytoplasm without the added purification of a sucrose cushion.

[0445] Quantification of mRNA level. Three shoot and three root biological replicates were typically harvested for each line, as described above in the protein quantification methods section. RNA was prepared using a 96-well format protocol, and cDNA synthesized from each sample. These preparations were used as templates for RT-PCR experiments. We measured the levels of transcript for a gene of interest (such as G481) relative to 18S RNA transcript for each sample using an ABI 7900 Real-Time RT-PCR machine with SYBR Green technology.

[0446] Phenotypic Analysis: Flowering time. Plants were grown in soil. Flowering time was determined based on either or both of (i) number to days after planting to the first visible flower bud. (ii) the total number of leaves (rosette or rosette plus cauline) produced by the primary shoot meristem.

[0447] Phenotypic Analysis: Heat stress. In preliminary experiments described in this report, plants were germinated growth chamber at 30 C with 24 h light for 11 d. Plants were allowed to recover in 22 C with 24 h light for three days, and photographs were taken to record health after the treatment. In a second experiment, seedlings were grown at 22 C for four days on selective media, and the plates transferred to 32 C for one week. They were then allowed to recover at 22 C for three days. Forty plants from two separate plates were harvested for each line, and both fresh weight and chlorophyll content measured.

[0448] Phenotypic Analysis: Dark-induced senescence. In preliminary experiments described in this report, plants were grown on soil for 27-30 days in 12 h light at 22 C. They were moved to a dark chamber at 22 C, and visually evaluated for senescence after 10-13 days. In some cases we used Fv/Fm as a measure of chlorophyll (Pourtau et al., 2004) on the youngest most fully-expanded leaf on each plant. The Fv/Fm mean for the 12 plants from each line was normalized to the Fv/Fm mean for the 12 matched controls.

[0449] Microscopy. Light microscopy was performed by us. Electron and confocal microscopy were performed using the facilities at University of California, Berkeley.

Various Definitions Used in this Report:
RWC=Relative water content (field wt.−dry weight)/(turgid wt.−dry wt.)×100
ABA=Abscisic acid, μg/gdw
Proline=Proline, μmole/gdw
A 300=net assimilation rate, μmole CO₂/m²/s at 300 ppm CO₂
A 1000=net assimilation rate, μmole CO₂/m²/s at 1000 ppm CO₂
Ch1 SPAD=Chlorophyll estimated by a Minolta SPAD-502, ratio of 650 nm to 940 nm
Total Ch1=mg/gfw, estimated by HPLC
Carot=mg/gfw, estimated by HPLC
Fo=minimal fluorescence of a dark adapted leaf
Fm′=maximal fluorescence of a dark adapted leaf
Fo′=minimal fluorescence of a light adapted leaf
Fm′=maximal fluorescence of a light adapted leaf
Fs=steady state fluorescence of a light adapted leaf
Psi lf=water potential (Mpa) of a leaf
Psi p=turgor potential (Mpa) of a leaf
Psi pi=osmotic potential (Mpa) of a leaf
Fv/Fm=(Fm−Fo)/Fm; maximum quantum yield of PSII
Fv′/Fm′=(Fm′−Fo′)/Fm′; efficiency of energy harvesting by open PSII reaction centers
PhiPS2=(Fm′−Fs)/Fm′, actual quantum yield of PSII
ETR=PhiPS2×light intensity absorbed×0.5; we use 100 μE/m²/s for an average light intensity and 85% as the amount of light absorbed
qP=(Fm′−Fs)/(Fm′−Fo′); photochemical quenching (includes photosynthesis and photorespiration); proportion of open PSII
qN=(Fm−Fm′)/(Fm−Fo′); non-photochemical quenching (includes mechanisms like heat dissipation)
NPQ=(Fm−Fm′)/Fm′; non-photochemical quenching (includes mechanisms like heat dissipation)

### Example XI

### Disease Physiology, Plate Assays

[0450] Overview. A Sclerotinia plate-based assay was used as a pre-screen to identify top performing lines from each project (i.e., lines from transformation with a particular construct) that could be tested in subsequent soil-based assays. Top performing lines were also subjected to Botrytis cinerea plate assays as noted. Typically, eight lines were subjected to plate assays, from which the best lines were selected for subsequent soil-based assays. In projects where significant pathogen resistance was not obtained in plate based assays, lines were not submitted for soil assays.

[0451] Unless otherwise stated, all experiments were performed with the Arabidopsis thaliana ecotype Columbia (Col-0). Assays were usually performed on non-selected segregating T2 populations (in order to avoid the extra stress of selection). Control plants for assays on lines containing direct promoter-fusion constructs were wild-type plants or Col-0 plants transformed an empty transformation vector (pMEN65). Controls for 2-component lines (generated by supertransformation) were the background promoter-driver lines (i.e. promoter::LexA-GAL4TA lines), into which the supertransformations were initially performed.

[0452] Procedures. Prior to plating, seed for all experiments were surface sterilized in the following manner: (1) 5 minute incubation with mixing in 70% ethanol; (2) 20 minute incubation with mixing in 30% bleach, 0.01% Triton X-100; (3) five rinses with sterile water. Seeds were resuspended in 0.1% sterile agarose and stratified at 4° C. for 2-4 days.

[0453] Sterile seeds were sown on starter plates (15 mm deep) containing the following medium: 50% MS solution, 1% sucrose, 0.05% MES, and 1% Bacto-Agar. 40 to 50 seeds were sown on each plate. Plates were incubated at 22° C. under 24-hour light (95-110 μE m² s⁻¹) in a germination growth chamber. On day 10, seedlings were transferred to assay plates (25 mm deep plates with medium minus sucrose). Each assay plate had nine test seedlings and nine control seedlings on separate halves of the plate. Three or four plates were used per line, per pathogen. On day 14, seedlings were inoculated (specific methods below). After inoculation, plates were put in a growth chamber under a 12-hour light/12-hour dark schedule. Light intensity was lowered to 70-80 μE m² s⁻¹ for the disease assay. Disease symptoms were evaluated starting four days post-inoculation (DPI) up to 10 DPI if necessary. For each plate, the number of dead test plants and control plants were counted. Plants were scored as “dead” if the center of the rosette collapsed (usually brown or water-soaked).

[0454] Sclerotinia inoculum preparation. A Sclerotinia liquid culture was started three days prior to plant inoculation by cutting a small agar plug (¼ sq. inch) from a 14- to 21-day old Sclerotinia plate (on Potato Dextrose Agar; PDA) and placing it into 100 ml of half-strength Potato Dextrose Broth (PDB). The culture was allowed to grown in the PDB at room temperature under 24-hour light for three days. On the day of seedling inoculation, the hyphal ball was retrieved from the medium, weighed, and ground in a blender with water (50 ml/gm tissue). After grinding, the mycelial suspension was filtered through two layers of cheesecloth and the resulting suspension was diluted 1:5 in water. Plants were inoculated by spraying to run-off with the mycelial suspension using a Preval aerosol sprayer.

[0455] Botrytis inoculum preparation. Botrytis inoculum was prepared on the day of inoculation. Spores from a 14- to 21-day old plate were resuspended in a solution of 0.05% glucose, 0.03M KH₂PO₄ to a final concentration of 10⁴ spores/ml. Seedlings were inoculated with a Preval aerosol sprayer, as with Sclerotinia inoculation.

[0456] Data Interpretation. After the plates were evaluated, each line was given one of the following overall scores:

[0457] (++) Substantially enhanced resistance compared to controls. The phenotype was very consistent across all plates for a given line.

[0458] (+) Enhanced resistance compared to controls. The response was consistent but was only moderately above the normal levels of variability observed for that assay.

[0459] (wt) No detectable difference from wild-type controls.

[0460] (−) Increased susceptibility compared to controls. The response was consistent but was only moderately above the normal levels of variability observed for that assay.

[0461] (−−) Substantially impaired performance compared to controls. The phenotype was consistent and growth was significantly above the normal levels of variability observed for that assay.

[0462] (n/d) Experiment failed, data not obtained, or assay not performed.

### Example XII

### Disease Physiology, Soil Assays

[0463] Overview. Lines from transformation with a particular construct were tested in a soil-based assay for resistance to powdery mildew (Erysiphe cichoracearum) as noted below. Typically, eight lines per project were subjected to the Erysiphe assay.

[0464] Unless otherwise stated, all experiments were performed with the Arabidopsis thaliana ecotype Columbia (Col-0). Assays were usually performed on non-selected segregating T2 populations (in order to avoid the extra stress of selection). Control plants for assays on lines containing direct promoter-fusion constructs were wild-type plants or Col-0 plants transformed an empty transformation vector (pMEN65). Controls for 2-component lines (generated by supertransformation) were the background promoter-driver lines (i.e. promoter::LexA-GAL4TA lines), into which the supertransformations were initially performed.

[0465] In addition, positive hits from the Sclerotinia plate assay were subjected to a soil-based Sclerotinia assay as noted. This assay was based on hyphal plug inoculation of rosette leaves.

[0466] Procedures. Erysiphe inoculum was propagated on a pad4 mutant line in the Col-0 background, which is highly susceptible to Erysiphe (Reuber et al., 1998). The inoculum was maintained by using a small paintbrush to dust conidia from a 2-3 week old culture onto new plants (generally three weeks old). For the assay, seedlings were grown on plates for one week under 24-hour light in a germination chamber, then transplanted to soil and grown in a walk-in growth chamber under a 12-hour light/12-hour dark light regimen, 70% humidity. Each line was transplanted to two 13 cm square pots, nine plants per pot. In addition, three control plants were transplanted to each pot for direct comparison with the test line. Approximately 3.5 weeks after transplanting, plants were inoculated using settling towers as described by Reuber et al. (1998). Generally, three to four heavily infested leaves were used per pot for the disease assay. The level of fungal growth was evaluated eight to ten days after inoculation.

[0467] Data Interpretation. After the pots were evaluated, each line was given one of the following overall scores:

[0468] (+++) Highly enhanced resistance as compared to controls. The phenotype was very consistent.

[0469] (++) Substantially enhanced resistance compared to controls. The phenotype was very consistent in both pots for a given line.

[0470] (+) Enhanced resistance compared to controls. The response was consistent but was only moderately above the normal levels of variability observed.

[0471] (wt) No detectable difference from wild-type controls.

[0472] (−) Increased susceptibility compared to controls. The response was consistent but was only moderately above the normal levels of variability observed.

[0473] (−−) Substantially impaired performance compared to controls. The phenotype was consistent and growth was significantly above the normal levels of variability observed.

[0474] (n/d) Experiment failed, data not obtained, or assay not performed.

### Example XIII

### Experimental Results

[0475] This report provides experimental observations for ten transcription factors for drought tolerance (G481; G682; G867; G912; G1073; G47; G1274; G1792; G2999; G3086) and two transcription factors for disease resistance (G28; G1792). A set of polynucleotides and polypeptides related to each lead transcription factor has been designated as a “study group” and related sequences in these clades have been subsequently analyzed using morphological and phenotypic studies.

[0476] Phenotypic Screens: promoter combinations. A panel of promoters was assembled based on domains of expression that had been well characterized in the published literature. These were chosen to represent broad non-constitutive patterns which covered the major organs and tissues of the plant. The following domain-specific promoters were picked, each of which drives expression in a particular tissue or cell-type: ARSK1 (root), RBCS3 (photosynthetic tissue, including leaf tissue), CUT1 (shoot epidermal, guard-cell enhanced), SUC2 (vascular), STM (apical meristem and mature-organ enhanced), AP1 (floral meristem enhanced), AS1 (young organ primordia) and RSI1 (young seedlings, and roots). Also selected was a stress inducible promoter, RD29A, which is able to up-regulate a transgene at drought onset.

[0477] The basic strategy was to test each polynucleotide with each promoter to give insight into the following questions: (i) mechanistically, in which part of the plant is activity of the polynucleotide sufficient to produce stress tolerance? (ii) Can we identify expression patterns which produce compelling stress tolerance while eliminating any undesirable effects on growth and development? (iii) Does a particular promoter give an enhanced or equivalent stress tolerance phenotype relative to constitutive expression? Each of the promoters in this panel is considered to be representative of a particular pattern of expression; thus, for example, if a particular promoter such as SUC2, which drives expression in vascular tissue, yields a positive result with a particular transcription factor gene, it would be predicted and expected that a positive result would be obtained with any other promoter that drives the same vascular pattern.

[0478] We now have many examples demonstrating the principle that use of a regulated promoter can confer substantial stress tolerance while minimizing deleterious effects. For example, the results from regulating G1792-related genes using regional specific promoters were especially persuasive. When overexpressed constitutively, these genes produced extreme dwarfing. However, when non-constitutive promoters were used to express these sequences ectopically, off-types were substantially ameliorated, and strong disease tolerance was still obtained (for example, with RBCS3::G1792 and RBCS3::G1795 lines). Another project worth highlighting is ARSK1::G867 where expression in the roots yielded drought tolerance without any apparent off-types.

[0479] Additionally, it is feasible to identify promoters which afford high levels of inducible expression. For instance, a major tactic in the disease program is to utilize pathogen inducible promoters; a set of these has now been identified for testing with each of the disease-resistance conferring transcription factors. This approach is expected to be productive as we have shown that inducible expression of G1792 via the dexamethasone system gives effective disease tolerance without off-types. By analogy, it would be useful to take a similar approach for the drought tolerance trait. So far the only drought regulated promoter that we have tested is RD29A, since its utility had been published (Kasuga et al., 1999).

[0480] Phenotypic Screens: effects of protein variants for distinct transcription factors. The effects of overexpressing a variety of different types of protein variants including: deletion variants, GAL4 fusions, variants with specific residues mutagenized, and forms in which domains are swapped with other proteins, have been examined. Together, these approaches have been informative, and have helped illuminate the role of specific residues (see for example, the site-directed mutagenesis experiments for G1274 or G1792), as well as giving new clues as to the basis of particular phenotypes. For example, overexpression lines for a G481 deletion variant exhibited drought tolerance, suggesting that the G481 drought phenotype might arise from dominant negative type interactions.

[0481] Phenotypic Screens: knockout and knock-down approaches. Thus far, both T-DNA alleles and RNAi methods have been used to isolate knockouts/knockdown lines for transcription factors of interest. In general, it was determined that the knockout (KO) approach to be more informative and easier to interpret than RNAi based strategies. In particular, RNAi approaches are hampered by the possibility that other related transcription factors might be directly or indirectly knocked-down (even when using a putative gene-specific construct). Thus, a set of RNAi lines showing an interesting phenotype requires a very substantial amount of molecular characterization to prove that the phenotypes are due to reduced activity of the targeted gene. We have found that KO lines have given some useful insights into the relative endogenous roles of particular genes within the CAAT family, and revealed the potential for obtaining stress tolerance traits via knock-down strategies (e.g., G481 knockout/knockdown approaches).

[0482] The following table summarizes the experimental results that have yielded new phenotypic traits in morphological, physiological or disease assays in Arabidopsis. The last column lists the trait that was experimentally observed in plants after: (i) transforming with each transcription factor polynucleotide GID (Gene IDentifier, found in the first column) under the listed regulatory control mechanism (found in the fifth or “Project Column”); (ii) in the cases where the project is listed as “KO”, where the transcription factor was knocked out; or (iii) in the cases where the project is listed as “RNAi (GS) or RNAi(clade), the transcription factor was knocked down using RNAi targeting either the gene sequence or the clade of related genes, respectively.

TABLE 25
Phenotypic traits conferred by Arabidopsis transcription factors in morphological, physiological or
disease assays in Arabidopsis

| | | Species from | | | | |
|---|---|---|---|---|---|---|
| | SEQ | which GID | | | | |
| | ID | was | | | | Experimental observation |
| GID | NO: | obtained | Clade | Project | Trait Category | (trait compared to controls) |
| G1006 | 152 | Arabidopsis | G28 | Constitutive | Resistance to | Increased resistance to |
| | | thaliana | | 35S | Sclerotinia | Sclerotinia |
| G3430 | 168 | Oryza sativa | G28 | Constitutive | Resistance to | Increased resistance to |
| | | | | 35S | Sclerotinia | Sclerotinia |
| G3660 | 158 | Brassica | G28 | Constitutive | Resistance to | Increased resistance to |
| | | oleracea | | 35S | Sclerotinia | Sclerotinia |
| G3718 | 156 | Glycine max | G28 | Constitutive | Resistance to | Increased resistance to |
| | | | | 35S | Sclerotinia | Sclerotinia |
| G3717 | 154 | Glycine max | G28 | Constitutive | Resistance to | Increased resistance to |
| | | | | 35S | Erysiphe | Erysiphe |
| G3659 | 150 | Brassica | G28 | Constitutive | Resistance to | Increased resistance to |
| | | oleracea | | 35S | Erysiphe | Erysiphe |
| G3718 | 156 | Glycine max | G28 | Constitutive | Resistance to | Increased resistance to |
| | | | | 35S | Erysiphe | Erysiphe |
| G2133 | 176 | Arabidopsis | G47 | Constitutive | Altered | Inflorescence: decreased |
| | | thaliana | | 35S | architecture | apical dominance |
| G47 | 174 | Arabidopsis | G47 | Leaf RBCS3 | Cold tolerance | Increased tolerance to cold |
| | | thaliana | | | | |
| G2115 | 406 | Arabidopsis | G47 | Constitutive | Cold tolerance | Increased tolerance to cold |
| | | thaliana | | 35S | | |
| G2133 | 176 | Arabidopsis | G47 | Constitutive | Cold tolerance | Increased tolerance to cold |
| | | thaliana | | 35S | | |
| G3643 | 178 | Glycine max | G47 | Constitutive | Cold tolerance | Increased tolerance to cold |
| | | | | 35S | | |
| G3649 | 184 | Oryza sativa | G47 | Constitutive | Cold tolerance | Increased tolerance to cold |
| | | | | 35S | | |
| G47 | 174 | Arabidopsis | G47 | Stress | Altered | Decreased ABA sensitivity |
| | | thaliana | | Inducible | hormone | |
| | | | | RD29A | sensitivity | |
| G47 | 174 | Arabidopsis | G47 | Stress | Drought | Increased tolerance to |
| | | thaliana | | Inducible | tolerance | dehydration |
| | | | | RD29A | | |
| G2133 | 176 | Arabidopsis | G47 | Constitutive | Drought | Increased tolerance to |
| | | thaliana | | 35S | tolerance | dehydration |
| G2133 | 176 | Arabidopsis | G47 | Leaf RBCS3 | Drought | Increased tolerance to |
| | | thaliana | | | tolerance | dehydration |
| G2133 | 176 | Arabidopsis | G47 | Stress | Drought | Increased tolerance to |
| | | thaliana | | Inducible | tolerance | dehydration |
| | | | | RD29A | | |
| G3643 | 178 | Glycine max | G47 | Constitutive | Drought | Increased tolerance to drought |
| | | | | 35S | tolerance | in soil assays |
| G47 | 174 | Arabidopsis | G47 | GAL4 N- | Altered | Early flowering |
| | | thaliana | | term (Super | flowering time | |
| | | | | Active) | | |
| G47 | 174 | Arabidopsis | G47 | Vascular | Altered | Late flowering |
| | | thaliana | | SUC2 | flowering time | |
| G3649 | 184 | Oryza sativa | G47 | Constitutive | Altered | Late flowering |
| | | | | 35S | flowering time | |
| G47 | 174 | Arabidopsis | G47 | Shoot apical | Altered leaf | Large leaf size |
| | | thaliana | | meristem | morphology | |
| | | | | STM | | |
| G47 | 174 | Arabidopsis | G47 | Vascular | Altered leaf | Dark green leaf color |
| | | thaliana | | SUC2 | morphology | |
| G47 | 174 | Arabidopsis | G47 | Vascular | Altered leaf | Large leaf size |
| | | thaliana | | SUC2 | morphology | |
| G47 | 174 | Arabidopsis | G47 | Vascular | Altered stem | Thicker stem |
| | | thaliana | | SUC2 | morphology | |
| G3644 | 182 | Oryza sativa | G47 | Constitutive | Altered stem | Thicker stem |
| | | | | 35S | morphology | |
| G3649 | 184 | Oryza sativa | G47 | Constitutive | Altered stem | Thicker stem |
| | | | | 35S | morphology | |
| G481 | 22 | Arabidopsis | G481 | Constitutive | Altered | Increased chlorophyll |
| | | thaliana | | 35S | biochemistry | |
| G481 | 2 | Arabidopsis | G481 | Constitutive | Altered | Increased starch |
| | | thaliana | | 35S | biochemistry | |
| G481 | 2 | Arabidopsis | G481 | Constitutive | Altered | Photosynthesis rate increased |
| | | thaliana | | 35S | biochemistry | |
| G481 | 2 | Arabidopsis | G481 | Vascular | Cold tolerance | Increased tolerance to cold |
| | | thaliana | | SUC2 | | |
| G481 | 2 | Arabidopsis | G481 | Constitutive | Cold tolerance | Increased tolerance to cold |
| | | thaliana | | 35S | | |
| G481 | 2 | Arabidopsis | G481 | RNAi (GS) | Cold tolerance | Increased tolerance to cold |
| | | thaliana | | | | |
| G485 | 18 | Arabidopsis | G481 | Constitutive | Cold tolerance | Increased tolerance to cold |
| | | thaliana | | 35S | | |
| G489 | 46 | Arabidopsis | G481 | Constitutive | Cold tolerance | Increased tolerance to cold |
| | | thaliana | | 35S | | |
| G926 | 52 | Arabidopsis | G481 | KO | Cold tolerance | Increased tolerance to cold |
| | | thaliana | | | | |
| G928 | 400 | Arabidopsis | G481 | Constitutive | Cold tolerance | Increased tolerance to cold |
| | | thaliana | | 35S | | |
| G1248 | 360 | Arabidopsis | G481 | Constitutive | Cold tolerance | Increased tolerance to cold |
| | | thaliana | | 35S | | |
| G1820 | 44 | Arabidopsis | G481 | Constitutive | Cold tolerance | Increased tolerance to cold |
| | | thaliana | | 35S | | |
| G1836 | 48 | Arabidopsis | G481 | Constitutive | Cold tolerance | Increased tolerance to cold |
| | | thaliana | | 35S | | |
| G2345 | 22 | Arabidopsis | G481 | Constitutive | Cold tolerance | Increased tolerance to cold |
| | | thaliana | | 35S | | |
| G2539 | 408 | Arabidopsis | G481 | Constitutive | Cold tolerance | Increased tolerance to cold |
| | | thaliana | | 35S | | |
| G3396 | 42 | Oryza sativa | G481 | Constitutive | Cold tolerance | Increased tolerance to cold |
| | | | | 35S | | |
| G3397 | 36 | Oryza sativa | G481 | Constitutive | Cold tolerance | Increased tolerance to cold |
| | | | | 35S | | |
| G3398 | 40 | Oryza sativa | G481 | Constitutive | Cold tolerance | Increased tolerance to cold |
| | | | | 35S | | |
| G3475 | 16 | Glycine max | G481 | Constitutive | Cold tolerance | Increased tolerance to cold |
| | | | | 35S | | |
| G3476 | 20 | Glycine max | G481 | Constitutive | Cold tolerance | Increased tolerance to cold |
| | | | | 35S | | |
| G3876 | 8 | Oryza sativa | G481 | Constitutive | Cold tolerance | Increased tolerance to cold |
| | | | | 35S | | |
| G481 | 2 | Arabidopsis | G481 | Deletion | Drought | Increased tolerance to drought |
| | | thaliana | | variant | tolerance | in soil assays |
| G481 | 2 | Arabidopsis | G481 | RNAi (GS) | Drought | Increased tolerance to drought |
| | | thaliana | | | tolerance | in soil assays |
| G481 | 2 | Arabidopsis | G481 | Vascular | Drought | Increased tolerance to |
| | | thaliana | | SUC2 | tolerance | dehydration |
| G481 | 2 | Arabidopsis | G481 | Vascular | Drought | Increased tolerance to drought |
| | | thaliana | | SUC2 | tolerance | in soil assays |
| G482 | 28 | Arabidopsis | G481 | Constitutive | Drought | Increased tolerance to drought |
| | | thaliana | | 35S | tolerance | in soil assays |
| G485 | 18 | Arabidopsis | G481 | Constitutive | Drought | Increased tolerance to drought |
| | | thaliana | | 35S | tolerance | in soil assays |
| G485 | 18 | Arabidopsis | G481 | KO | Drought | Increased tolerance to drought |
| | | thaliana | | | tolerance | in soil assays |
| G634 | 50 | Arabidopsis | G481 | Constitutive | Drought | Increased tolerance to |
| | | thaliana | | 35S | tolerance | dehydration |
| G1248 | 360 | Arabidopsis | G481 | Constitutive | Drought | Increased tolerance to drought |
| | | thaliana | | 35S | tolerance | in soil assays |
| G1818 | 404 | Arabidopsis | G481 | Constitutive | Drought | Increased tolerance to |
| | | thaliana | | 35S | tolerance | dehydration |
| G1820 | 44 | Arabidopsis | G481 | Constitutive | Drought | Increased tolerance to drought |
| | | thaliana | | 35S | tolerance | in soil assays |
| G1836 | 48 | Arabidopsis | G481 | Constitutive | Drought | Increased tolerance to drought |
| | | thaliana | | 35S | tolerance | in soil assays |
| G2345 | 22 | Arabidopsis | G481 | Constitutive | Drought | Increased tolerance to drought |
| | | thaliana | | 35S | tolerance | in soil assays |
| G2539 | 408 | Arabidopsis | G481 | Constitutive | Drought | Increased tolerance to drought |
| | | thaliana | | 35S | tolerance | in soil assays |
| G3074 | 410 | Arabidopsis | G481 | Constitutive | Drought | Increased tolerance to |
| | | thaliana | | 35S | tolerance | dehydration |
| G3395 | 38 | Oryza sativa | G481 | Constitutive | Drought | Increased tolerance to drought |
| | | | | 35S | tolerance | in soil assays |
| G3398 | 40 | Oryza sativa | G481 | Constitutive | Drought | Increased tolerance to drought |
| | | | | 35S | tolerance | in soil assays |
| G3434 | 12 | Zea mays | G481 | Constitutive | Drought | Increased tolerance to |
| | | | | 35S | tolerance | dehydration |
| G3435 | 30 | Zea mays | G481 | Constitutive | Drought | Increased tolerance to drought |
| | | | | 35S | tolerance | in soil assays |
| G3470 | 4 | Glycine max | G481 | Constitutive | Drought | Increased tolerance to drought |
| | | | | 35S | tolerance | in soil assays |
| G3471 | 6 | Glycine max | G481 | Constitutive | Drought | Increased tolerance to drought |
| | | | | 35S | tolerance | in soil assays |
| G3476 | 20 | Glycine max | G481 | Constitutive | Drought | Increased tolerance to |
| | | | | 35S | tolerance | dehydration |
| G3476 | 20 | Glycine max | G481 | Constitutive | Drought | Increased tolerance to drought |
| | | | | 35S | tolerance | in soil assays |
| G3876 | 8 | Oryza sativa | G481 | Constitutive | Drought | Increased tolerance to |
| | | | | 35S | tolerance | dehydration |
| G481 | 2 | Arabidopsis | G481 | GAL4 C- | Altered | Early flowering |
| | | thaliana | | term (Super | flowering time | |
| | | | | Active) | | |
| G481 | 2 | Arabidopsis | G481 | RNAi (clade) | Altered | Late flowering |
| | | thaliana | | | flowering time | |
| G481 | 2 | Arabidopsis | G481 | Vascular | Altered | Late flowering |
| | | thaliana | | SUC2 | flowering time | |
| G482 | 28 | Arabidopsis | G481 | Constitutive | Altered | Early flowering |
| | | thaliana | | 35S | flowering time | |
| G482 | 28 | Arabidopsis | G481 | Vascular | Altered | Early flowering |
| | | thaliana | | SUC2 | flowering time | |
| G3397 | 36 | Oryza sativa | G481 | Constitutive | Altered | Early flowering |
| | | | | 35S | flowering time | |
| G3398 | 40 | Oryza sativa | G481 | Constitutive | Altered | Early flowering |
| | | | | 35S | flowering time | |
| G3435 | 30 | Zea mays | G481 | Constitutive | Altered | Early flowering |
| | | | | 35S | flowering time | |
| G3436 | 34 | Zea mays | G481 | Constitutive | Altered | Early flowering |
| | | | | 35S | flowering time | |
| G3474 | 24 | Glycine max | G481 | Constitutive | Altered | Early flowering |
| | | | | 35S | flowering time | |
| G3475 | 16 | Glycine max | G481 | Constitutive | Altered | Early flowering |
| | | | | 35S | flowering time | |
| G481 | 2 | Arabidopsis | G481 | Constitutive | Altered | Late flowering |
| | | thaliana | | 35S | flowering time | |
| G481 | 2 | Arabidopsis | G481 | KO | Altered | Early flowering |
| | | thaliana | | | flowering time | |
| G1334 | 54 | Arabidopsis | G481 | Constitutive | Altered | Early flowering |
| | | thaliana | | 35S | flowering time | |
| G1781 | 56 | Arabidopsis | G481 | Constitutive | Altered | Early flowering |
| | | thaliana | | 35S | flowering time | |
| G3396 | 42 | Oryza sativa | G481 | Constitutive | Altered | Late flowering |
| | | | | 35S | flowering time | |
| G3429 | 58 | Oryza sativa | G481 | Constitutive | Altered | Late flowering |
| | | | | 35S | flowering time | |
| G3434 | 12 | Zea mays | G481 | Constitutive | Altered | Early flowering |
| | | | | 35S | flowering time | |
| G3470 | 4 | Glycine max | G481 | Constitutive | Altered | Late flowering |
| | | | | 35S | flowering time | |
| G3478 | 26 | Glycine max | G481 | Constitutive | Altered | Early flowering |
| | | | | 35S | flowering time | |
| G481 | 2 | Arabidopsis | G481 | GAL4 C- | Heat tolerance | Increased tolerance to heat |
| | | thaliana | | term (Super | | |
| | | | | Active) | | |
| G3436 | 34 | Zea mays | G481 | Constitutive | Heat tolerance | Increased tolerance to heat |
| | | | | 35S | | |
| G485 | 18 | Arabidopsis | G481 | KO | Altered | Decreased ABA sensitivity |
| | | thaliana | | | hormone | |
| | | | | | sensitivity | |
| G481 | 2 | Arabidopsis | G481 | Constitutive | Altered | Decreased ABA sensitivity |
| | | thaliana | | 35S | hormone | |
| | | | | | sensitivity | |
| G485 | 18 | Arabidopsis | G481 | Constitutive | Altered | Decreased ABA sensitivity |
| | | thaliana | | 35S | hormone | |
| | | | | | sensitivity | |
| G1820 | 44 | Arabidopsis | G481 | Constitutive | Altered | Decreased ABA sensitivity |
| | | thaliana | | 35S | hormone | |
| | | | | | sensitivity | |
| G1836 | 48 | Arabidopsis | G481 | Constitutive | Altered | Decreased ABA sensitivity |
| | | thaliana | | 35S | hormone | |
| | | | | | sensitivity | |
| G3396 | 42 | Oryza sativa | G481 | Constitutive | Altered | Decreased ABA sensitivity |
| | | | | 35S | hormone | |
| | | | | | sensitivity | |
| G481 | 2 | Arabidopsis | G481 | Vascular | Altered leaf | Dark green leaf color |
| | | thaliana | | SUC2 | morphology | |
| G481 | 2 | Arabidopsis | G481 | Constitutive | Altered | Increased seedling size |
| | | thaliana | | 35S | morphology | |
| G481 | 2 | Arabidopsis | G481 | GAL4 C- | Altered | Increased seedling size |
| | | thaliana | | term (Super | morphology | |
| | | | | Active) | | |
| G3397 | 36 | Oryza sativa | G481 | Constitutive | Altered | Increased seedling size |
| | | | | 35S | morphology | |
| G482 | 28 | Arabidopsis | G481 | Constitutive | Tolerance to | Increased tolerance to |
| | | thaliana | | 35S | hyperosmotic | mannitol |
| | | | | | stress | |
| G485 | 18 | Arabidopsis | G481 | Constitutive | Tolerance to | Increased tolerance to sucrose |
| | | thaliana | | 35S | hyperosmotic | |
| | | | | | stress | |
| G926 | 52 | Arabidopsis | G481 | KO | Altered sugar | Increased tolerance to sugar |
| | | thaliana | | | sensing | |
| G928 | 400 | Arabidopsis | G481 | Constitutive | Tolerance to | Increased tolerance to sucrose |
| | | thaliana | | 35S | hyperosmotic | |
| | | | | | stress | |
| G1820 | 44 | Arabidopsis | G481 | Constitutive | Tolerance to | Increased tolerance to sucrose |
| | | thaliana | | 35S | hyperosmotic | and mannitol |
| | | | | | stress | |
| G1836 | 48 | Arabidopsis | G481 | Constitutive | Tolerance to | Increased tolerance to sucrose |
| | | thaliana | | 35S | hyperosmotic | |
| | | | | | stress | |
| G3470 | 4 | Glycine max | G481 | Constitutive | Tolerance to | Increased tolerance to sucrose |
| | | | | 35S | hyperosmotic | and mannitol |
| | | | | | stress | |
| G634 | 50 | Arabidopsis | G481 | Constitutive | Altered root | Increased root mass |
| | | thaliana | | 35S | morphology | |
| G3472 | 32 | Glycine max | G481 | Constitutive | Altered root | Increased root hair |
| | | | | 35S | morphology | |
| G3472 | 32 | Glycine max | G481 | Constitutive | Tolerance to | Increased tolerance to NaCl |
| | | | | 35S | sodium | |
| | | | | | chloride | |
| G485 | 18 | Arabidopsis | G481 | KO | Tolerance to | Increased tolerance to NaCl |
| | | thaliana | | | sodium | |
| | | | | | chloride | |
| G481 | 2 | Arabidopsis | G481 | GAL4 C- | Tolerance to | Increased tolerance to NaCl |
| | | thaliana | | term (Super | sodium | |
| | | | | Active) | chloride | |
| G481 | 2 | Arabidopsis | G481 | KO | Tolerance to | Decreased tolerance to NaCl |
| | | thaliana | | | sodium | |
| | | | | | chloride | |
| G485 | 18 | Arabidopsis | G481 | Constitutive | Tolerance to | Increased tolerance to NaCl |
| | | thaliana | | 35S | sodium | |
| | | | | | chloride | |
| G1820 | 44 | Arabidopsis | G481 | Constitutive | Tolerance to | Increased tolerance to NaCl |
| | | thaliana | | 35S | sodium | |
| | | | | | chloride | |
| G3429 | 58 | Oryza sativa | G481 | Constitutive | Tolerance to | Increased tolerance to NaCl |
| | | | | 35S | sodium | |
| | | | | | chloride | |
| G3434 | 12 | Zea mays | G481 | Constitutive | Tolerance to | Increased tolerance to NaCl |
| | | | | 35S | sodium | |
| | | | | | chloride | |
| G3470 | 4 | Glycine max | G481 | Constitutive | Tolerance to | Increased tolerance to NaCl |
| | | | | 35S | sodium | |
| | | | | | chloride | |
| G2718 | 64 | Arabidopsis | G682 | Constitutive | Altered | Decreased anthocyanin |
| | | thaliana | | 35S | biochemistry | |
| G3392 | 72 | Oryza sativa | G682 | Constitutive | Altered | Decreased anthocyanin |
| | | | | 35S | biochemistry | |
| G3393 | 66 | Oryza sativa | G682 | Constitutive | Altered | Decreased anthocyanin |
| | | | | 35S | biochemistry | |
| G3431 | 68 | Zea mays | G682 | Constitutive | Altered | Decreased anthocyanin |
| | | | | 35S | biochemistry | |
| G3444 | 70 | Zea mays | G682 | Constitutive | Altered | Decreased anthocyanin |
| | | | | 35S | biochemistry | |
| G226 | 62 | Arabidopsis | G682 | Root ARSK1 | Cold tolerance | Increased tolerance to cold |
| | | thaliana | | | | |
| G682 | 60 | Arabidopsis | G682 | Epidermal | Cold tolerance | Increased tolerance to cold |
| | | thaliana | | LTP1 | | |
| G682 | 60 | Arabidopsis | G682 | Vascular | Cold tolerance | Increased tolerance to cold |
| | | thaliana | | SUC2 | | |
| G3392 | 72 | Oryza sativa | G682 | Constitutive | Cold tolerance | Increased tolerance to cold |
| | | | | 35S | | |
| G3393 | 66 | Oryza sativa | G682 | Constitutive | Cold tolerance | Increased tolerance to cold |
| | | | | 35S | | |
| G3431 | 68 | Zea mays | G682 | Constitutive | Cold tolerance | Increased tolerance to cold |
| | | | | 35S | | |
| G3448 | 80 | Glycine max | G682 | Constitutive | Cold tolerance | Increased tolerance to cold |
| | | | | 35S | | |
| G3449 | 78 | Glycine max | G682 | Constitutive | Cold tolerance | Increased tolerance to cold |
| | | | | 35S | | |
| G3450 | 74 | Glycine max | G682 | Constitutive | Cold tolerance | Increased tolerance to cold |
| | | | | 35S | | |
| G1816 | 76 | Arabidopsis | G682 | Constitutive | Drought | Increased tolerance to drought |
| | | thaliana | | 35S | tolerance | in soil assays |
| G3450 | 74 | Glycine max | G682 | Constitutive | Drought | Increased tolerance to drought |
| | | | | 35S | tolerance | in soil assays |
| G682 | 60 | Arabidopsis | G682 | GAL4 N- | Drought | Increased tolerance to |
| | | thaliana | | term (Super | tolerance | dehydration |
| | | | | Active) | | |
| G682 | 60 | Arabidopsis | G682 | Vascular | Drought | Increased tolerance to drought |
| | | thaliana | | SUC2 | tolerance | in soil assays |
| G3446 | 82 | Glycine max | G682 | Constitutive | Drought | Increased tolerance to drought |
| | | | | 35S | tolerance | in soil assays |
| G3447 | 86 | Glycine max | G682 | Constitutive | Drought | Increased tolerance to drought |
| | | | | 35S | tolerance | in soil assays |
| G3448 | 80 | Glycine max | G682 | Constitutive | Drought | Increased tolerance to drought |
| | | | | 35S | tolerance | in soil assays |
| G3445 | 84 | Glycine max | G682 | Constitutive | Altered | Late flowering |
| | | | | 35S | flowering time | |
| G682 | 60 | Arabidopsis | G682 | Vascular | Heat tolerance | Increased tolerance to heat |
| | | thaliana | | SUC2 | | |
| G3450 | 74 | Glycine max | G682 | Constitutive | Heat tolerance | Increased tolerance to heat |
| | | | | 35S | | |
| G226 | 62 | Arabidopsis | G682 | Constitutive | Altered | Decreased ABA sensitivity |
| | | thaliana | | 35S | hormone | |
| | | | | | sensitivity | |
| G682 | 60 | Arabidopsis | G682 | Constitutive | Altered | Decreased ABA sensitivity |
| | | thaliana | | 35S | hormone | |
| | | | | | sensitivity | |
| G682 | 60 | Arabidopsis | G682 | RNAi (GS) | Altered | Decreased ABA sensitivity |
| | | thaliana | | | hormone | |
| | | | | | sensitivity | |
| G682 | 60 | Arabidopsis | G682 | RNAi (clade) | Altered | Decreased ABA sensitivity |
| | | thaliana | | | hormone | |
| | | | | | sensitivity | |
| G3445 | 84 | Glycine max | G682 | Constitutive | Altered | Decreased ABA sensitivity |
| | | | | 35S | hormone | |
| | | | | | sensitivity | |
| G682 | 60 | Arabidopsis | G682 | Constitutive | Altered | Increased tolerance to low |
| | | thaliana | | 35S | nutrient uptake | nitrogen conditions |
| G1816 | 76 | Arabidopsis | G682 | Constitutive | Altered | Altered C/N sensing: |
| | | thaliana | | 35S | nutrient uptake | increased tolerance to basal |
| | | | | | | media minus nitrogen plus 3% |
| | | | | | | sucrose and/or basal media |
| | | | | | | minus nitrogen plus 3% |
| | | | | | | sucrose and 1 mM glutamine |
| G1816 | 76 | Arabidopsis | G682 | Constitutive | Altered | Increased tolerance to low |
| | | thaliana | | 35S | nutrient uptake | nitrogen conditions |
| G3393 | 66 | Oryza sativa | G682 | Constitutive | Altered | Altered C/N sensing: |
| | | | | 35S | nutrient uptake | increased tolerance to basal |
| | | | | | | media minus nitrogen plus 3% |
| | | | | | | sucrose and/or basal media |
| | | | | | | minus nitrogen plus 3% |
| | | | | | | sucrose and 1 mM glutamine |
| G226 | 62 | Arabidopsis | G682 | Constitutive | Altered | Altered C/N sensing: |
| | | thaliana | | 35S | nutrient uptake | increased tolerance to basal |
| | | | | | | media minus nitrogen plus 3% |
| | | | | | | sucrose and/or basal media |
| | | | | | | minus nitrogen plus 3% |
| | | | | | | sucrose and 1 mM glutamine |
| G226 | 62 | Arabidopsis | G682 | Constitutive | Altered | Increased tolerance to low |
| | | thaliana | | 35S | nutrient uptake | nitrogen conditions |
| G682 | 60 | Arabidopsis | G682 | GAL4 C- | Altered | Altered C/N sensing: |
| | | thaliana | | term (Super | nutrient uptake | increased tolerance to basal |
| | | | | Active) | | media minus nitrogen plus 3% |
| | | | | | | sucrose and/or basal media |
| | | | | | | minus nitrogen plus 3% |
| | | | | | | sucrose and 1 mM glutamine |
| G682 | 60 | Arabidopsis | G682 | GAL4 C- | Altered | Increased tolerance to low |
| | | thaliana | | term (Super | nutrient uptake | nitrogen conditions |
| | | | | Active) | | |
| G682 | 60 | Arabidopsis | G682 | GAL4 N- | Altered | Increased tolerance to low |
| | | thaliana | | term (Super | nutrient uptake | nitrogen conditions |
| | | | | Active) | | |
| G682 | 60 | Arabidopsis | G682 | Epidermal | Altered | Altered C/N sensing: |
| | | thaliana | | LTP1 | nutrient uptake | increased tolerance to basal |
| | | | | | | media minus nitrogen plus 3% |
| | | | | | | sucrose and/or basal media |
| | | | | | | minus nitrogen plus 3% |
| | | | | | | sucrose and 1 mM glutamine |
| G682 | 60 | Arabidopsis | G682 | Epidermal | Altered | Increased tolerance to low |
| | | thaliana | | LTP1 | nutrient uptake | nitrogen conditions |
| G1816 | 76 | Arabidopsis | G682 | Epidermal | Altered | Increased tolerance to low |
| | | thaliana | | CUT1 | nutrient uptake | nitrogen conditions |
| G3392 | 72 | Oryza sativa | G682 | Constitutive | Altered | Increased tolerance to low |
| | | | | 35S | nutrient uptake | nitrogen conditions |
| G3392 | 72 | Oryza sativa | G682 | Constitutive | Altered | Altered C/N sensing: |
| | | | | 35S | nutrient uptake | increased tolerance to basal |
| | | | | | | media minus nitrogen plus 3% |
| | | | | | | sucrose and/or basal media |
| | | | | | | minus nitrogen plus 3% |
| | | | | | | sucrose and 1 mM glutamine |
| G3393 | 66 | Oryza sativa | G682 | Constitutive | Altered | Increased tolerance to low |
| | | | | 35S | nutrient uptake | nitrogen conditions |
| G3431 | 68 | Zea mays | G682 | Constitutive | Altered | Altered C/N sensing: |
| | | | | 35S | nutrient uptake | increased tolerance to basal |
| | | | | | | media minus nitrogen plus 3% |
| | | | | | | sucrose and/or basal media |
| | | | | | | minus nitrogen plus 3% |
| | | | | | | sucrose and 1 mM glutamine |
| G3431 | 68 | Zea mays | G682 | Constitutive | Altered | Increased tolerance to low |
| | | | | 35S | nutrient uptake | nitrogen conditions |
| G3444 | 70 | Zea mays | G682 | Constitutive | Altered | Increased tolerance to low |
| | | | | 35S | nutrient uptake | nitrogen conditions |
| G3447 | 86 | Glycine max | G682 | Constitutive | Altered | Increased tolerance to low |
| | | | | 35S | nutrient uptake | nitrogen conditions |
| G3448 | 80 | Glycine max | G682 | Constitutive | Altered | Altered C/N sensing: |
| | | | | 35S | nutrient uptake | increased tolerance to basal |
| | | | | | | media minus nitrogen plus 3% |
| | | | | | | sucrose and/or basal media |
| | | | | | | minus nitrogen plus 3% |
| | | | | | | sucrose and 1 mM glutamine |
| G3448 | 80 | Glycine max | G682 | Constitutive | Altered | Increased tolerance to low |
| | | | | 35S | nutrient uptake | nitrogen conditions |
| G3449 | 78 | Glycine max | G682 | Constitutive | Altered | Altered C/N sensing: |
| | | | | 35S | nutrient uptake | increased tolerance to basal |
| | | | | | | media minus nitrogen plus 3% |
| | | | | | | sucrose and/or basal media |
| | | | | | | minus nitrogen plus 3% |
| | | | | | | sucrose and 1 mM glutamine |
| G3449 | 78 | Glycine max | G682 | Constitutive | Altered | Increased tolerance to low |
| | | | | 35S | nutrient uptake | nitrogen conditions |
| G3450 | 74 | Glycine max | G682 | Constitutive | Altered | Altered C/N sensing: |
| | | | | 35S | nutrient uptake | increased tolerance to basal |
| | | | | | | media minus nitrogen plus 3% |
| | | | | | | sucrose and/or basal media |
| | | | | | | minus nitrogen plus 3% |
| | | | | | | sucrose and 1 mM glutamine |
| G3450 | 70 | Glycine max | G682 | Constitutive | Altered | Increased tolerance to low |
| | | | | 35S | nutrient uptake | nitrogen conditions |
| G682 | 60 | Arabidopsis | G682 | Constitutive | Tolerance to | Increased tolerance to sucrose |
| | | thaliana | | 35S | hyperosmotic | |
| | | | | | stress | |
| G226 | 62 | Arabidopsis | G682 | Constitutive | Tolerance to | Increased tolerance to sucrose |
| | | thaliana | | 35S | hyperosmotic | |
| | | | | | stress | |
| G3392 | 72 | Oryza sativa | G682 | Constitutive | Tolerance to | Increased tolerance to |
| | | | | 35S | hyperosmotic | mannitol |
| | | | | | stress | |
| G682 | 60 | Arabidopsis | G682 | Vascular | Altered size | Increased biomass |
| | | thaliana | | SUC2 | | |
| G3393 | 66 | Oryza sativa | G682 | Constitutive | Altered root | Increased root hair |
| | | | | 35S | morphology | |
| G226 | 62 | Arabidopsis | G682 | Constitutive | Altered root | Increased root hair |
| | | thaliana | | 35S | morphology | |
| G682 | 60 | Arabidopsis | G682 | Constitutive | Altered root | Increased root hair |
| | | thaliana | | 35S | morphology | |
| G3392 | 72 | Oryza sativa | G682 | Constitutive | Altered root | Increased root hair |
| | | | | 35S | morphology | |
| G3431 | 68 | Zea mays | G682 | Constitutive | Altered root | Increased root hair |
| | | | | 35S | morphology | |
| G3444 | 70 | Zea mays | G682 | Constitutive | Altered root | Increased root hair |
| | | | | 35S | morphology | |
| G3448 | 80 | Glycine max | G682 | Constitutive | Altered root | Increased root hair |
| | | | | 35S | morphology | |
| G3449 | 78 | Glycine max | G682 | Constitutive | Altered root | Increased root hair |
| | | | | 35S | morphology | |
| G3450 | 70 | Glycine max | G682 | Constitutive | Altered root | Increased root hair |
| | | | | 35S | morphology | |
| G3392 | 72 | Oryza sativa | G682 | Constitutive | Altered seed | Pale seed color |
| | | | | 35S | morphology | |
| G3393 | 66 | Oryza sativa | G682 | Constitutive | Altered seed | Pale seed color |
| | | | | 35S | morphology | |
| G3431 | 68 | Zea mays | G682 | Constitutive | Altered seed | Pale seed color |
| | | | | 35S | morphology | |
| G3444 | 70 | Zea mays | G682 | Constitutive | Altered seed | Pale seed color |
| | | | | 35S | morphology | |
| G682 | 60 | Arabidopsis | G682 | RNAi (GS) | Tolerance to | Increased tolerance to NaCl |
| | | thaliana | | | sodium | |
| | | | | | chloride | |
| G1816 | 76 | Arabidopsis | G682 | KO | Tolerance to | Increased tolerance to NaCl |
| | | thaliana | | | sodium | |
| | | | | | chloride | |
| G682 | 60 | Arabidopsis | G682 | Epidermal | Tolerance to | Increased tolerance to NaCl |
| | | thaliana | | CUT1 | sodium | |
| | | | | | chloride | |
| G3392 | 72 | Oryza sativa | G682 | Constitutive | Tolerance to | Increased tolerance to NaCl |
| | | | | 35S | sodium | |
| | | | | | chloride | |
| G1816 | 76 | Arabidopsis | G682 | Constitutive | Altered sugar | Increased tolerance to sugar |
| | | thaliana | | 35S | sensing | |
| G2718 | 64 | Arabidopsis | G682 | Constitutive | Altered sugar | Increased tolerance to sugar |
| | | thaliana | | 35S | sensing | |
| G3392 | 72 | Oryza sativa | G682 | Constitutive | Altered sugar | Increased tolerance to sugar |
| | | | | 35S | sensing | |
| G3431 | 68 | Zea mays | G682 | Constitutive | Altered sugar | Increased tolerance to sugar |
| | | | | 35S | sensing | |
| G682 | 60 | Arabidopsis | G682 | Epidermal | Altered | Decreased trichome density |
| | | thaliana | | LTP1 | trichome | |
| | | | | | morphology | |
| G2718 | 64 | Arabidopsis | G682 | Constitutive | Altered | Decreased trichome density |
| | | thaliana | | 35S | trichome | |
| | | | | | morphology | |
| G3392 | 72 | Oryza sativa | G682 | Constitutive | Altered | Decreased trichome density |
| | | | | 35S | trichome | |
| | | | | | morphology | |
| G3393 | 66 | Oryza sativa | G682 | Constitutive | Altered | Decreased trichome density |
| | | | | 35S | trichome | |
| | | | | | morphology | |
| G3431 | 68 | Zea mays | G682 | Constitutive | Altered | Decreased trichome density |
| | | | | 35S | trichome | |
| | | | | | morphology | |
| G3444 | 70 | Zea mays | G682 | Constitutive | Altered | Decreased trichome density |
| | | | | 35S | trichome | |
| | | | | | morphology | |
| G3445 | 84 | Glycine max | G682 | Constitutive | Altered | Decreased trichome density |
| | | | | 35S | trichome | |
| | | | | | morphology | |
| G3446 | 82 | Glycine max | G682 | Constitutive | Altered | Decreased trichome density |
| | | | | 35S | trichome | |
| | | | | | morphology | |
| G3447 | 86 | Glycine max | G682 | Constitutive | Altered | Decreased trichome density |
| | | | | 35S | trichome | |
| | | | | | morphology | |
| G3448 | 80 | Glycine max | G682 | Constitutive | Altered | Decreased trichome density |
| | | | | 35S | trichome | |
| | | | | | morphology | |
| G3449 | 78 | Glycine max | G682 | Constitutive | Altered | Decreased trichome density |
| | | | | 35S | trichome | |
| | | | | | morphology | |
| G3450 | 70 | Glycine max | G682 | Constitutive | Altered | Decreased trichome density |
| | | | | 35S | trichome | |
| | | | | | morphology | |
| G9 | 106 | Arabidopsis | G867 | Constitutive | Cold tolerance | Increased tolerance to cold |
| | | thaliana | | 35S | | |
| G867 | 88 | Arabidopsis | G867 | Constitutive | Cold tolerance | Increased tolerance to cold |
| | | thaliana | | 35S | | |
| G867 | 88 | Arabidopsis | G867 | Deletion | Cold tolerance | Increased tolerance to cold |
| | | thaliana | | variant | | |
| G867 | 88 | Arabidopsis | G867 | GAL4 C- | Cold tolerance | Increased tolerance to cold |
| | | thaliana | | term (Super | | |
| | | | | Active) | | |
| G993 | 90 | Arabidopsis | G867 | Constitutive | Cold tolerance | Increased tolerance to cold |
| | | thaliana | | 35S | | |
| G1930 | 92 | Arabidopsis | G867 | Constitutive | Cold tolerance | Increased tolerance to cold |
| | | thaliana | | 35S | | |
| G3389 | 104 | Oryza sativa | G867 | Constitutive | Cold tolerance | Increased tolerance to cold |
| | | | | 35S | | |
| G3452 | 98 | Glycine max | G867 | Constitutive | Cold tolerance | Increased tolerance to cold |
| | | | | 35S | | |
| G867 | 88 | Arabidopsis | G867 | Root ARSK1 | Drought | Increased tolerance to drought |
| | | thaliana | | | tolerance | in soil assays |
| G867 | 88 | Arabidopsis | G867 | Vascular | Drought | Increased tolerance to |
| | | thaliana | | SUC2 | tolerance | dehydration |
| G867 | 88 | Arabidopsis | G867 | Deletion | Drought | Increased tolerance to |
| | | thaliana | | variant | tolerance | dehydration |
| G867 | 88 | Arabidopsis | G867 | GAL4 N- | Drought | Increased tolerance to drought |
| | | thaliana | | term (Super | tolerance | in soil assays |
| | | | | Active) | | |
| G867 | 88 | Arabidopsis | G867 | RNAi (clade) | Drought | Increased tolerance to drought |
| | | thaliana | | | tolerance | in soil assays |
| G867 | 88 | Arabidopsis | G867 | Stress | Drought | Increased tolerance to drought |
| | | thaliana | | Inducible | tolerance | in soil assays |
| | | | | RD29A | | |
| G867 | 88 | Arabidopsis | G867 | Vascular | Drought | Increased tolerance to drought |
| | | thaliana | | SUC2 | tolerance | in soil assays |
| G3389 | 104 | Oryza sativa | G867 | Constitutive | Drought | Increased tolerance to drought |
| | | | | 35S | tolerance | in soil assays |
| G3390 | 112 | Oryza sativa | G867 | Constitutive | Drought | Increased tolerance to |
| | | | | 35S | tolerance | dehydration |
| G3432 | 102 | Zea mays | G867 | Constitutive | Drought | Increased tolerance to drought |
| | | | | 35S | tolerance | in soil assays |
| G3451 | 108 | Glycine max | G867 | Constitutive | Drought | Increased tolerance to drought |
| | | | | 35S | tolerance | in soil assays |
| G867 | 88 | Arabidopsis | G867 | RNAi (clade) | Altered | Late flowering |
| | | thaliana | | | flowering time | |
| G3389 | 104 | Oryza sativa | G867 | Constitutive | Altered | Early flowering |
| | | | | 35S | flowering time | |
| G3389 | 104 | Oryza sativa | G867 | Constitutive | Heat tolerance | Increased tolerance to heat |
| | | | | 35S | | |
| G9 | 106 | Arabidopsis | G867 | Constitutive | Altered | Decreased ABA sensitivity |
| | | thaliana | | 35S | hormone | |
| | | | | | sensitivity | |
| G867 | 88 | Arabidopsis | G867 | Constitutive | Altered | Decreased ABA sensitivity |
| | | thaliana | | 35S | hormone | |
| | | | | | sensitivity | |
| G867 | 88 | Arabidopsis | G867 | Root ARSK1 | Altered | Decreased ABA sensitivity |
| | | thaliana | | | hormone | |
| | | | | | sensitivity | |
| G3390 | 112 | Oryza sativa | G867 | Constitutive | Altered | Decreased ABA sensitivity |
| | | | | 35S | hormone | |
| | | | | | sensitivity | |
| G3453 | 100 | Glycine max | G867 | Constitutive | Altered | Decreased ABA sensitivity |
| | | | | 35S | hormone | |
| | | | | | sensitivity | |
| G9 | 106 | Arabidopsis | G867 | Constitutive | Tolerance to | Increased tolerance to sucrose |
| | | thaliana | | 35S | hyperosmotic | |
| | | | | | stress | |
| G993 | 90 | Arabidopsis | G867 | Constitutive | Tolerance to | Increased tolerance to sucrose |
| | | thaliana | | 35S | hyperosmotic | |
| | | | | | stress | |
| G867 | 88 | Arabidopsis | G867 | Vascular | Tolerance to | Increased tolerance to sucrose |
| | | thaliana | | SUC2 | hyperosmotic | |
| | | | | | stress | |
| G3451 | 108 | Glycine max | G867 | Constitutive | Tolerance to | Increased tolerance to sucrose |
| | | | | 35S | hyperosmotic | |
| | | | | | stress | |
| G3452 | 98 | Glycine max | G867 | Constitutive | Tolerance to | Increased tolerance to sucrose |
| | | | | 35S | hyperosmotic | |
| | | | | | stress | |
| G9 | 106 | Arabidopsis | G867 | Constitutive | Altered root | Increased root hair |
| | | thaliana | | 35S | morphology | |
| G867 | 88 | Arabidopsis | G867 | Constitutive | Altered root | Increased root hair |
| | | thaliana | | 35S | morphology | |
| G993 | 90 | Arabidopsis | G867 | Constitutive | Altered root | Increased root hair |
| | | thaliana | | 35S | morphology | |
| G3451 | 108 | Glycine max | G867 | Constitutive | Altered root | Increased root hair |
| | | | | 35S | morphology | |
| G3452 | 98 | Glycine max | G867 | Constitutive | Altered root | Increased root hair |
| | | | | 35S | morphology | |
| G3455 | 96 | Glycine max | G867 | Constitutive | Altered root | Increased root hair |
| | | | | 35S | morphology | |
| G867 | 88 | Arabidopsis | G867 | RNAi (clade) | Altered size | Increased biomass |
| | | thaliana | | | | |
| G867 | 88 | Arabidopsis | G867 | GAL4 N- | Tolerance to | Increased tolerance to NaCl |
| | | thaliana | | term (Super | sodium | |
| | | | | Active) | chloride | |
| G867 | 88 | Arabidopsis | G867 | Leaf RBCS3 | Tolerance to | Increased tolerance to NaCl |
| | | thaliana | | | sodium | |
| | | | | | chloride | |
| G867 | 88 | Arabidopsis | G867 | Stress | Tolerance to | Increased tolerance to NaCl |
| | | thaliana | | Inducible | sodium | |
| | | | | RD29A | chloride | |
| G867 | 88 | Arabidopsis | G867 | Vascular | Tolerance to | Increased tolerance to NaCl |
| | | thaliana | | SUC2 | sodium | |
| | | | | | chloride | |
| G3389 | 104 | Oryza sativa | G867 | Constitutive | Tolerance to | Increased tolerance to NaCl |
| | | | | 35S | sodium | |
| | | | | | chloride | |
| G3391 | 94 | Oryza sativa | G867 | Constitutive | Tolerance to | Increased tolerance to NaCl |
| | | | | 35S | sodium | |
| | | | | | chloride | |
| G3452 | 98 | Glycine max | G867 | Constitutive | Tolerance to | Increased tolerance to NaCl |
| | | | | 35S | sodium | |
| | | | | | chloride | |
| G3456 | 132 | Glycine max | G867 | Constitutive | Tolerance to | Increased tolerance to NaCl |
| | | | | 35S | sodium | |
| | | | | | chloride | |
| G867 | 88 | Arabidopsis | G867 | GAL4 C- | Altered sugar | Increased tolerance to sugar |
| | | thaliana | | term (Super | sensing | |
| | | | | Active) | | |
| G3455 | 96 | Glycine max | G867 | Constitutive | Altered sugar | Increased tolerance to sugar |
| | | | | 35S | sensing | |
| G922 | 328 | Arabidopsis | G922 | Constitutive | Drought | Increased tolerance to |
| | | thaliana | | 35S | tolerance | dehydration |
| G922 | 328 | Arabidopsis | G922 | Constitutive | Drought | Increased tolerance to drought |
| | | thaliana | | 35S | tolerance | in soil assays |
| G922 | 328 | Arabidopsis | G922 | Constitutive | Tolerance to | Increased tolerance to NaCl |
| | | thaliana | | 35S | sodium | |
| | | | | | chloride | |
| G922 | 328 | Arabidopsis | G922 | Constitutive | Altered sugar | Increased tolerance to sugar |
| | | thaliana | | 35S | sensing | |
| G922 | 328 | Arabidopsis | G922 | Constitutive | Cold tolerance | Increased tolerance to cold |
| | | thaliana | | 35S | | |
| G922 | 328 | Arabidopsis | G922 | Constitutive | Altered | Decreased ABA sensitivity |
| | | thaliana | | 35S | hormone | |
| | | | | | sensitivity | |
| G1073 | 114 | Arabidopsis | G1073 | Floral | Cold tolerance | Increased tolerance to cold |
| | | thaliana | | meristem | | |
| | | | | AP1 | | |
| G1073 | 114 | Arabidopsis | G1073 | Double Over- | Cold tolerance | Increased tolerance to cold |
| | | thaliana | | expression | | |
| | | | | (with G481) | | |
| G2153 | 138 | Arabidopsis | G1073 | Constitutive | Cold tolerance | Increased tolerance to cold |
| | | thaliana | | 35S | | |
| G2156 | 130 | Arabidopsis | G1073 | Constitutive | Cold tolerance | Increased tolerance to cold |
| | | thaliana | | 35S | | |
| G3400 | 124 | Oryza sativa | G1073 | Constitutive | Cold tolerance | Increased tolerance to cold |
| | | | | 35S | | |
| G3456 | 132 | Glycine max | G1073 | Constitutive | Cold tolerance | Increased tolerance to cold |
| | | | | 35S | | |
| G3459 | 122 | Glycine max | G1073 | Constitutive | Cold tolerance | Increased tolerance to cold |
| | | | | 35S | | |
| G1073 | 114 | Arabidopsis | G1073 | Double Over- | Altered | Increased tolerance to low |
| | | thaliana | | expression | nutrient uptake | nitrogen conditions |
| | | | | (with G481) | | |
| G1073 | 114 | Arabidopsis | G1073 | Constitutive | Drought | Increased tolerance to drought |
| | | thaliana | | 35S | tolerance | in soil assays |
| G1073 | 114 | Arabidopsis | G1073 | Constitutive | Drought | Increased tolerance to |
| | | thaliana | | 35S | tolerance | dehydration |
| G1073 | 114 | Arabidopsis | G1073 | Shoot apical | Drought | Increased tolerance to |
| | | thaliana | | meristem | tolerance | dehydration |
| | | | | STM | | |
| G1073 | 114 | Arabidopsis | G1073 | Shoot apical | Drought | Increased tolerance to drought |
| | | thaliana | | meristem | tolerance | in soil assays |
| | | | | STM | | |
| G1073 | 114 | Arabidopsis | G1073 | GAL4 C- | Drought | Increased tolerance to |
| | | thaliana | | term (Super | tolerance | dehydration |
| | | | | Active) | | |
| G1073 | 114 | Arabidopsis | G1073 | GAL4 C- | Drought | Increased tolerance to drought |
| | | thaliana | | term (Super | tolerance | in soil assays |
| | | | | Active) | | |
| G1073 | 114 | Arabidopsis | G1073 | RNAi (GS) | Drought | Increased tolerance to |
| | | thaliana | | | tolerance | dehydration |
| G1073 | 114 | Arabidopsis | G1073 | RNAi (clade) | Drought | Increased tolerance to |
| | | thaliana | | | tolerance | dehydration |
| G1067 | 120 | Arabidopsis | G1073 | Constitutive | Drought | Increased tolerance to drought |
| | | thaliana | | 35S | tolerance | in soil assays |
| G1067 | 120 | Arabidopsis | G1073 | stress | Drought | Increased tolerance to |
| | | thaliana | | Inducible | tolerance | dehydration |
| | | | | RD29A | | |
| G1067 | 120 | Arabidopsis | G1073 | stress | Drought | Increased tolerance to drought |
| | | thaliana | | Inducible | tolerance | in soil assays |
| | | | | RD29A | | |
| G1067 | 120 | Arabidopsis | G1073 | Root ARSK1 | Drought | Increased tolerance to |
| | | thaliana | | | tolerance | dehydration |
| G2153 | 138 | Arabidopsis | G1073 | Constitutive | Drought | Increased tolerance to drought |
| | | thaliana | | 35S | tolerance | in soil assays |
| G2156 | 130 | Arabidopsis | G1073 | Constitutive | Drought | Increased tolerance to drought |
| | | thaliana | | 35S | tolerance | in soil assays |
| G2156 | 130 | Arabidopsis | G1073 | Root ARSK1 | Drought | Increased tolerance to |
| | | thaliana | | | tolerance | dehydration |
| G2157 | 144 | Arabidopsis | G1073 | Constitutive | Drought | Increased tolerance to |
| | | thaliana | | 35S | tolerance | dehydration |
| G3399 | 118 | Oryza sativa | G1073 | Constitutive | Drought | Increased tolerance to |
| | | | | 35S | tolerance | dehydration |
| G3399 | 118 | Oryza sativa | G1073 | Constitutive | Drought | Increased tolerance to drought |
| | | | | 35S | tolerance | in soil assays |
| G3400 | 124 | Oryza sativa | G1073 | Constitutive | Drought | Increased tolerance to drought |
| | | | | 35S | tolerance | in soil assays |
| G3401 | 136 | Oryza sativa | G1073 | Constitutive | Drought | Increased tolerance to drought |
| | | | | 35S | tolerance | in soil assays |
| G3408 | 146 | Oryza sativa | G1073 | Constitutive | Drought | Increased tolerance to drought |
| | | | | 35S | tolerance | in soil assays |
| G3456 | 132 | Glycine max | G1073 | Constitutive | Drought | Increased tolerance to drought |
| | | | | 35S | tolerance | in soil assays |
| G3460 | 126 | Glycine max | G1073 | Constitutive | Drought | Increased tolerance to drought |
| | | | | 35S | tolerance | in soil assays |
| G3556 | 142 | Oryza sativa | G1073 | Constitutive | Drought | Increased tolerance to |
| | | | | 35S | tolerance | dehydration |
| G1073 | 114 | Arabidopsis | G1073 | Constitutive | Altered flower | Large flower |
| | | thaliana | | 35S | morphology | |
| G2153 | 138 | Arabidopsis | G1073 | Constitutive | Altered flower | Large flower |
| | | thaliana | | 35S | morphology | |
| G2156 | 130 | Arabidopsis | G1073 | Constitutive | Altered flower | Large flower |
| | | thaliana | | 35S | morphology | |
| G3399 | 118 | Oryza sativa | G1073 | Constitutive | Altered flower | Large flower |
| | | | | 35S | morphology | |
| G3400 | 124 | Oryza sativa | G1073 | Constitutive | Altered flower | Large flower |
| | | | | 35S | morphology | |
| G2153 | 138 | Arabidopsis | G1073 | Constitutive | Altered | Late flowering |
| | | thaliana | | 35S | flowering time | |
| G2156 | 130 | Arabidopsis | G1073 | Constitutive | Altered | Late flowering |
| | | thaliana | | 35S | flowering time | |
| G2156 | 130 | Arabidopsis | G1073 | Root ARSK1 | Altered | Late flowering |
| | | thaliana | | | flowering time | |
| G3399 | 118 | Oryza sativa | G1073 | Constitutive | Altered | Late flowering |
| | | | | 35S | flowering time | |
| G3400 | 124 | Oryza sativa | G1073 | Constitutive | Altered | Late flowering |
| | | | | 35S | flowering time | |
| G3406 | 116 | Oryza sativa | G1073 | Constitutive | Heat tolerance | Increased tolerance to heat |
| | | | | 35S | | |
| G3459 | 122 | Glycine max | G1073 | Constitutive | Heat tolerance | Increased tolerance to heat |
| | | | | 35S | | |
| G3460 | 126 | Glycine max | G1073 | Constitutive | Heat tolerance | Increased tolerance to heat |
| | | | | 35S | | |
| G2153 | 138 | Arabidopsis | G1073 | Constitutive | Altered | Decreased ABA sensitivity |
| | | thaliana | | 35S | hormone | |
| | | | | | sensitivity | |
| G3406 | 116 | Oryza sativa | G1073 | Constitutive | Altered | Decreased ABA sensitivity |
| | | | | 35S | hormone | |
| | | | | | sensitivity | |
| G2156 | 130 | Arabidopsis | G1073 | Leaf RBCS3 | Altered leaf | Large leaf size |
| | | thaliana | | | morphology | |
| G1067 | 120 | Arabidopsis | G1073 | Leaf RBCS3 | Altered leaf | Large leaf size |
| | | thaliana | | | morphology | |
| G1067 | 120 | Arabidopsis | G1073 | Stress | Altered leaf | Large leaf size |
| | | thaliana | | Inducible | morphology | |
| | | | | RD29A | | |
| G2156 | 130 | Arabidopsis | G1073 | Constitutive | Altered leaf | Large leaf size |
| | | thaliana | | 35S | morphology | |
| G2157 | 144 | Arabidopsis | G1073 | Constitutive | Altered leaf | Altered leaf shape |
| | | thaliana | | 35S | morphology | |
| G2157 | 144 | Arabidopsis | G1073 | Constitutive | Altered leaf | Large leaf size |
| | | thaliana | | 35S | morphology | |
| G3399 | 118 | Oryza sativa | G1073 | Constitutive | Altered leaf | Large leaf size |
| | | | | 35S | morphology | |
| G3400 | 124 | Oryza sativa | G1073 | Constitutive | Altered leaf | Altered leaf shape (short |
| | | | | 35S | morphology | rounded curled leaves at early |
| | | | | | | stages, broad leaves at later |
| | | | | | | stages) |
| G3400 | 124 | Oryza sativa | G1073 | Constitutive | Altered leaf | Large leaf size |
| | | | | 35S | morphology | |
| G3456 | 132 | Glycine max | G1073 | Constitutive | Altered leaf | Dark green leaf color |
| | | | | 35S | morphology | |
| G3456 | 132 | Glycine max | G1073 | Constitutive | Altered leaf | Large leaf size |
| | | | | 35S | morphology | |
| G3460 | 126 | Glycine max | G1073 | Constitutive | Altered leaf | Dark green leaf color |
| | | | | 35S | morphology | |
| G3407 | 134 | Oryza sativa | G1073 | Constitutive | Altered | Increased seedling size |
| | | | | 35S | morphology | |
| G1073 | 114 | Arabidopsis | G1073 | Constitutive | Tolerance to | Increased tolerance to sucrose |
| | | thaliana | | 35S | hyperosmotic | |
| | | | | | stress | |
| G1067 | 120 | Arabidopsis | G1073 | Stress | Tolerance to | Increased tolerance to |
| | | thaliana | | Inducible | hyperosmotic | hyperosmotic stress |
| | | | | RD29A | stress | |
| G1073 | 114 | Arabidopsis | G1073 | Epidermal | Tolerance to | Increased tolerance to sucrose |
| | | thaliana | | CUT1 | hyperosmotic | and mannitol |
| | | | | | stress | |
| G1067 | 120 | Arabidopsis | G1073 | Stress | Altered root | Increased root hair |
| | | thaliana | | Inducible | morphology | |
| | | | | RD29A | | |
| G1073 | 114 | Arabidopsis | G1073 | Constitutive | Altered root | Altered root branching |
| | | thaliana | | 35S | morphology | |
| G1073 | 114 | Arabidopsis | G1073 | Constitutive | Altered root | Increased root mass |
| | | thaliana | | 35S | morphology | |
| G1073 | 114 | Arabidopsis | G1073 | Constitutive | Altered root | Increased root hair |
| | | thaliana | | 35S | morphology | |
| G3399 | 118 | Oryza sativa | G1073 | Constitutive | Altered root | Increased root hair |
| | | | | 35S | morphology | |
| G3399 | 118 | Oryza sativa | G1073 | Constitutive | Altered root | Increased root mass |
| | | | | 35S | morphology | |
| G3456 | 132 | Glycine max | G1073 | Constitutive | Altered | Late senescence |
| | | | | 35S | senescence | |
| G1073 | 114 | Arabidopsis | G1073 | Double Over- | Altered size | Increased biomass |
| | | thaliana | | expression | | |
| | | | | (with G481) | | |
| G2156 | 130 | Arabidopsis | G1073 | Leaf RBCS3 | Altered size | Increased biomass |
| | | thaliana | | | | |
| G3399 | 118 | Oryza sativa | G1073 | Constitutive | Altered size | Increased biomass |
| | | | | 35S | | |
| G3400 | 124 | Oryza sativa | G1073 | Constitutive | Altered size | Increased biomass |
| | | | | 35S | | |
| G3460 | 126 | Glycine max | G1073 | Constitutive | Altered size | Increased biomass |
| | | | | 35S | | |
| G1073 | 114 | Arabidopsis | G1073 | Deletion | Altered size | Increased biomass |
| | | thaliana | | variant | | |
| G1073 | 114 | Arabidopsis | G1073 | Vascular | Altered size | Increased biomass |
| | | thaliana | | SUC2 | | |
| G2153 | 138 | Arabidopsis | G1073 | Constitutive | Altered size | Increased biomass |
| | | thaliana | | 35S | | |
| G2156 | 130 | Arabidopsis | G1073 | Constitutive | Altered size | Increased biomass |
| | | thaliana | | 35S | | |
| G3456 | 132 | Glycine max | G1073 | Constitutive | Altered size | Increased biomass |
| | | | | 35S | | |
| G1073 | 114 | Arabidopsis | G1073 | Constitutive | Tolerance to | Increased tolerance to NaCl |
| | | thaliana | | 35S | sodium | |
| | | | | | chloride | |
| G2156 | 130 | Arabidopsis | G1073 | Constitutive | Tolerance to | Increased tolerance to NaCl |
| | | thaliana | | 35S | sodium | |
| | | | | | chloride | |
| G1067 | 120 | Arabidopsis | G1073 | Root ARSK1 | Tolerance to | Increased tolerance to NaCl |
| | | thaliana | | | sodium | |
| | | | | | chloride | |
| G1067 | 120 | Arabidopsis | G1073 | Leaf RBCS3 | Tolerance to | Increased tolerance to NaCl |
| | | thaliana | | | sodium | |
| | | | | | chloride | |
| G1067 | 120 | Arabidopsis | G1073 | Stress | Tolerance to | Increased tolerance to NaCl |
| | | thaliana | | Inducible | sodium | |
| | | | | RD29A | chloride | |
| G1073 | 114 | Arabidopsis | G1073 | Root ARSK1 | Tolerance to | Increased tolerance to NaCl |
| | | thaliana | | | sodium | |
| | | | | | chloride | |
| G3401 | 136 | Oryza sativa | G1073 | Constitutive | Tolerance to | Increased tolerance to NaCl |
| | | | | 35S | sodium | |
| | | | | | chloride | |
| G3459 | 122 | Glycine max | G1073 | Constitutive | Tolerance to | Increased tolerance to NaCl |
| | | | | 35S | sodium | |
| | | | | | chloride | |
| G3556 | 142 | Oryza sativa | G1073 | Constitutive | Tolerance to | Increased tolerance to NaCl |
| | | | | 35S | sodium | |
| | | | | | chloride | |
| G1073 | 114 | Arabidopsis | G1073 | Constitutive | Altered sugar | Increased tolerance to sugar |
| | | thaliana | | 35S | sensing | |
| G2156 | 130 | Arabidopsis | G1073 | Constitutive | Altered sugar | Increased tolerance to sugar |
| | | thaliana | | 35S | sensing | |
| G3401 | 136 | Oryza sativa | G1073 | Constitutive | Altered sugar | Increased tolerance to sugar |
| | | | | 35S | sensing | |
| G1274 | 186 | Arabidopsis | G1274 | GAL4 C- | Altered | Inflorescence: decreased |
| | | thaliana | | term (Super | architecture | apical dominance |
| | | | | Active) | | |
| G1274 | 186 | Arabidopsis | G1274 | Point | Altered | Inflorescence: decreased |
| | | thaliana | | mutation | architecture | apical dominance |
| G1274 | 186 | Arabidopsis | G1274 | Point | Altered | Altered C/N sensing: |
| | | thaliana | | mutation | nutrient uptake | increased tolerance to basal |
| | | | | | | media minus nitrogen plus 3% |
| | | | | | | sucrose and/or basal media |
| | | | | | | minus nitrogen plus 3% |
| | | | | | | sucrose and 1 mM glutamine |
| G3720 | 204 | Zea mays | G1274 | Constitutive | Altered | Increased tolerance to low |
| | | | | 35S | nutrient uptake | nitrogen conditions |
| G3722 | 200 | Zea mays | G1274 | Constitutive | Altered | Altered C/N sensing: |
| | | | | 35S | nutrient uptake | increased tolerance to basal |
| | | | | | | media minus nitrogen plus 3% |
| | | | | | | sucrose and/or basal media |
| | | | | | | minus nitrogen plus 3% |
| | | | | | | sucrose and 1 mM glutamine |
| G3727 | 196 | Zea mays | G1274 | Constitutive | Altered | Increased tolerance to low |
| | | | | 35S | nutrient uptake | nitrogen conditions |
| G3729 | 216 | Oryza sativa | G1274 | Constitutive | Altered | Altered C/N sensing: |
| | | | | 35S | nutrient uptake | increased tolerance to basal |
| | | | | | | media minus nitrogen plus 3% |
| | | | | | | sucrose and/or basal media |
| | | | | | | minus nitrogen plus 3% |
| | | | | | | sucrose and 1 mM glutamine |
| G3721 | 198 | Oryza sativa | G1274 | Constitutive | Tolerance to | Increased tolerance to |
| | | | | 35S | hyperosmotic | mannitol |
| | | | | | stress | |
| G1274 | 186 | Arabidopsis | G1274 | Constitutive | Drought | Increased tolerance to |
| | | thaliana | | 35S | tolerance | dehydration |
| G1274 | 186 | Arabidopsis | G1274 | Point | Drought | Increased tolerance to drought |
| | | thaliana | | mutation | tolerance | in soil assays |
| G1275 | 208 | Arabidopsis | G1274 | Constitutive | Drought | Increased tolerance to drought |
| | | thaliana | | 35S | tolerance | in soil assays |
| G1275 | 208 | Arabidopsis | G1274 | Stress | Drought | Increased tolerance to drought |
| | | thaliana | | Inducible | tolerance | in soil assays |
| | | | | RD29A | | |
| G3803 | 194 | Glycine max | G1274 | Constitutive | Drought | Increased tolerance to |
| | | | | 35S | tolerance | dehydration |
| G3719 | 212 | Zea mays | G1274 | Constitutive | Altered | Inflorescence: decreased |
| | | | | 35S | architecture | apical dominance |
| G3720 | 204 | Zea mays | G1274 | Constitutive | Altered | Inflorescence: decreased |
| | | | | 35S | architecture | apical dominance |
| G3721 | 198 | Oryza sativa | G1274 | Constitutive | Altered | Inflorescence: decreased |
| | | | | 35S | architecture | apical dominance |
| G3722 | 200 | Zea mays | G1274 | Constitutive | Altered | Inflorescence: decreased |
| | | | | 35S | architecture | apical dominance |
| G3726 | 202 | Oryza sativa | G1274 | Constitutive | Altered | Inflorescence: decreased |
| | | | | 35S | architecture | apical dominance |
| G1274 | 186 | Arabidopsis | G1274 | Constitutive | Cold tolerance | Increased tolerance to cold |
| | | thaliana | | 35S | | |
| G1274 | 186 | Arabidopsis | G1274 | Point | Cold tolerance | Increased tolerance to cold |
| | | thaliana | | mutation | | |
| G1275 | 208 | Arabidopsis | G1274 | Constitutive | Cold tolerance | Increased tolerance to cold |
| | | thaliana | | 35S | | |
| G1758 | 394 | Arabidopsis | G1274 | Constitutive | Cold tolerance | Increased tolerance to cold |
| | | thaliana | | 35S | | |
| G3721 | 198 | Oryza sativa | G1274 | Constitutive | Cold tolerance | Increased tolerance to cold |
| | | | | 35S | | |
| G3726 | 202 | Oryza sativa | G1274 | Constitutive | Cold tolerance | Increased tolerance to cold |
| | | | | 35S | | |
| G3729 | 216 | Oryza sativa | G1274 | Constitutive | Cold tolerance | Increased tolerance to cold |
| | | | | 35S | | |
| G3804 | 192 | Zea mays | G1274 | Constitutive | Cold tolerance | Increased tolerance to cold |
| | | | | 35S | | |
| G194 | 218 | Arabidopsis | G1274 | Constitutive | Drought | Increased tolerance to |
| | | thaliana | | 35S | tolerance | dehydration |
| G2517 | 220 | Arabidopsis | G1274 | Constitutive | Drought | Increased tolerance to |
| | | thaliana | | 35S | tolerance | dehydration |
| G3804 | 192 | Zea mays | G1274 | Constitutive | Drought | Increased tolerance to drought |
| | | | | 35S | tolerance | in soil assays |
| G2517 | 220 | Arabidopsis | G1274 | Constitutive | Altered | Early flowering |
| | | thaliana | | 35S | flowering time | |
| G1275 | 208 | Arabidopsis | G1274 | Constitutive | Heat tolerance | Increased tolerance to heat |
| | | thaliana | | 35S | | |
| G1274 | 186 | Arabidopsis | G1274 | Constitutive | Altered | Decreased ABA sensitivity |
| | | thaliana | | 35S | hormone | |
| | | | | | sensitivity | |
| G1275 | 208 | Arabidopsis | G1274 | Stress | Altered | Decreased ABA sensitivity |
| | | thaliana | | Inducible | hormone | |
| | | | | RD29A | sensitivity | |
| G3721 | 198 | Oryza sativa | G1274 | Constitutive | Altered | Decreased ABA sensitivity |
| | | | | 35S | hormone | |
| | | | | | sensitivity | |
| G3721 | 198 | Oryza sativa | G1274 | Constitutive | Tolerance to | Increased tolerance to NaCl |
| | | | | 35S | sodium | |
| | | | | | chloride | |
| G1274 | 186 | Arabidopsis | G1274 | Point | Altered leaf | Large leaf size |
| | | thaliana | | mutation | morphology | |
| G1274 | 186 | Arabidopsis | G1274 | GAL4 C- | Altered leaf | Large leaf size |
| | | thaliana | | term (Super | morphology | |
| | | | | Active) | | |
| G3724 | 188 | Glycine max | G1274 | Constitutive | Altered leaf | Large leaf size |
| | | | | 35S | morphology | |
| G3725 | 214 | Oryza sativa | G1274 | Constitutive | Altered root | Increased root mass |
| | | | | 35S | morphology | |
| G1274 | 186 | Arabidopsis | G1274 | Constitutive | Silique | Increased seed number |
| | | thaliana | | 35S | | |
| G1274 | 186 | Arabidopsis | G1274 | Constitutive | Silique | Trilocular silique |
| | | thaliana | | 35S | | |
| G3724 | 188 | Glycine max | G1274 | Constitutive | Altered size | Increased biomass |
| | | | | 35S | | |
| G1274 | 186 | Arabidopsis | G1274 | Constitutive | Altered sugar | Increased tolerance to sugar |
| | | thaliana | | 35S | sensing | |
| G1274 | 186 | Arabidopsis | G1274 | Point | Altered sugar | Increased tolerance to sugar |
| | | thaliana | | mutation | sensing | |
| G30 | 226 | Arabidopsis | G1792 | Dex induced | Resistance to | Increased resistance to |
| | | thaliana | | | Botrytis | Botrytis |
| G30 | 226 | Arabidopsis | G1792 | Leaf RBCS3 | Resistance to | Increased resistance to |
| | | thaliana | | | Botrytis | Botrytis |
| G1266 | 254 | Arabidopsis | G1792 | Constitutive | Resistance to | Increased resistance to |
| | | thaliana | | 35S | Botrytis | Botrytis |
| G1791 | 230 | Arabidopsis | G1792 | Dex induced | Resistance to | Increased resistance to |
| | | thaliana | | | Botrytis | Botrytis |
| G1792 | 222 | Arabidopsis | G1792 | Dex induced | Resistance to | Increased resistance to |
| | | thaliana | | | Botrytis | Botrytis |
| G1792 | 222 | Arabidopsis | G1792 | Leaf RBCS3 | Resistance to | Increased resistance to |
| | | thaliana | | | Botrytis | Botrytis |
| G1795 | 224 | Arabidopsis | G1792 | Epidermal | Resistance to | Increased resistance to |
| | | thaliana | | LTP1 | Botrytis | Botrytis |
| G1795 | 224 | Arabidopsis | G1792 | Leaf RBCS3 | Resistance to | Increased resistance to |
| | | thaliana | | | Botrytis | Botrytis |
| G1791 | 230 | Arabidopsis | G1792 | Epidermal | Resistance to | Increased resistance to |
| | | thaliana | | LTP1 | Botrytis | Botrytis |
| G1792 | 222 | Arabidopsis | G1792 | Constitutive | Cold tolerance | Increased tolerance to cold |
| | | thaliana | | 35S | | |
| G3380 | 250 | Oryza sativa | G1792 | Constitutive | Cold tolerance | Increased tolerance to cold |
| | | | | 35S | | |
| G3381 | 234 | Oryza sativa | G1792 | Constitutive | Cold tolerance | Increased tolerance to cold |
| | | | | 35S | | |
| G3383 | 228 | Oryza sativa | G1792 | Constitutive | Cold tolerance | Increased tolerance to cold |
| | | | | 35S | | |
| G3516 | 240 | Zea mays | G1792 | Constitutive | Cold tolerance | Increased tolerance to cold |
| | | | | 35S | | |
| G3517 | 244 | Zea mays | G1792 | Constitutive | Cold tolerance | Increased tolerance to cold |
| | | | | 35S | | |
| G3518 | 246 | Glycine max | G1792 | Constitutive | Cold tolerance | Increased tolerance to cold |
| | | | | 35S | | |
| G3724 | 188 | Glycine max | G1792 | Constitutive | Cold tolerance | Increased tolerance to cold |
| | | | | 35S | | |
| G3737 | 236 | Oryza sativa | G1792 | Constitutive | Cold tolerance | Increased tolerance to cold |
| | | | | 35S | | |
| G3739 | 248 | Zea mays | G1792 | Constitutive | Cold tolerance | Increased tolerance to cold |
| | | | | 35S | | |
| G3794 | 252 | Zea mays | G1792 | Constitutive | Cold tolerance | Increased tolerance to cold |
| | | | | 35S | | |
| G1791 | 230 | Arabidopsis | G1792 | Epidermal | Drought | Increased tolerance to |
| | | thaliana | | CUT1 | tolerance | dehydration |
| G1795 | 224 | Arabidopsis | G1792 | Vascular | Drought | Increased tolerance to |
| | | thaliana | | SUC2 | tolerance | dehydration |
| G3380 | 250 | Oryza sativa | G1792 | Constitutive | Drought | Increased tolerance to drought |
| | | | | 35S | tolerance | in soil assays |
| G3383 | 228 | Oryza sativa | G1792 | Constitutive | Drought | Increased tolerance to |
| | | | | 35S | tolerance | dehydration |
| G3515 | 238 | Oryza sativa | G1792 | Constitutive | Drought | Increased tolerance to drought |
| | | | | 35S | tolerance | in soil assays |
| G3518 | 246 | Glycine max | G1792 | Constitutive | Drought | Increased tolerance to drought |
| | | | | 35S | tolerance | in soil assays |
| G3737 | 236 | Zea mays | G1792 | Constitutive | Drought | Increased tolerance to |
| | | | | 35S | tolerance | dehydration |
| G3737 | 236 | Zea mays | G1792 | Constitutive | Drought | Increased tolerance to drought |
| | | | | 35S | tolerance | in soil assays |
| G3739 | 248 | Zea mays | G1792 | Constitutive | Drought | Increased tolerance to |
| | | | | 35S | tolerance | dehydration |
| G3794 | 252 | Zea mays | G1792 | Constitutive | Drought | Increased tolerance to |
| | | | | 35S | tolerance | dehydration |
| G1791 | 230 | Arabidopsis | G1792 | Vascular | Altered | Late flowering |
| | | thaliana | | SUC2 | flowering time | |
| G3517 | 244 | Zea mays | G1792 | Constitutive | Heat tolerance | Increased tolerance to heat |
| | | | | 35S | | |
| G1266 | 254 | Arabidopsis | G1792 | Constitutive | Altered | Decreased ABA sensitivity |
| | | thaliana | | 35S | hormone | |
| | | | | | sensitivity | |
| G1791 | 230 | Arabidopsis | G1792 | Leaf RBCS3 | Altered | Decreased ABA sensitivity |
| | | thaliana | | | hormone | |
| | | | | | sensitivity | |
| G1795 | 224 | Arabidopsis | G1792 | Vascular | Altered | Decreased ABA sensitivity |
| | | thaliana | | SUC2 | hormone | |
| | | | | | sensitivity | |
| G3518 | 246 | Glycine max | G1792 | Constitutive | Altered | Decreased ABA sensitivity |
| | | | | 35S | hormone | |
| | | | | | sensitivity | |
| G3724 | 188 | Glycine max | G1792 | Constitutive | Altered | Decreased ABA sensitivity |
| | | | | 35S | hormone | |
| | | | | | sensitivity | |
| G3737 | 236 | Zea mays | G1792 | Constitutive | Altered | Decreased ABA sensitivity |
| | | | | 35S | hormone | |
| | | | | | sensitivity | |
| G3739 | 248 | Zea mays | G1792 | Constitutive | Altered | Decreased ABA sensitivity |
| | | | | 35S | hormone | |
| | | | | | sensitivity | |
| G3380 | 250 | Oryza sativa | G1792 | Constitutive | Altered | Decreased ABA sensitivity |
| | | | | 35S | hormone | |
| | | | | | sensitivity | |
| G30 | 226 | Arabidopsis | G1792 | Vascular | Altered leaf | Glossy leaves |
| | | thaliana | | SUC2 | morphology | |
| G1792 | 222 | Arabidopsis | G1792 | Point | Altered leaf | Gray leaf color |
| | | thaliana | | mutation | morphology | |
| G30 | 226 | Arabidopsis | G1792 | AS1 | Light response | Altered leaf orientation |
| | | thaliana | | | | (upward pointing cotyledons) |
| G1752 | 402 | Arabidopsis | G1792 | Constitutive | Altered | Altered C/N sensing: |
| | | thaliana | | 35S | nutrient uptake | increased tolerance to basal |
| | | | | | | media minus nitrogen plus 3% |
| | | | | | | sucrose and/or basal media |
| | | | | | | minus nitrogen plus 3% |
| | | | | | | sucrose and 1 mM glutamine |
| G1792 | 222 | Arabidopsis | G1792 | Constitutive | Altered | Altered C/N sensing: |
| | | thaliana | | 35S | nutrient uptake | increased tolerance to basal |
| | | | | | | media minus nitrogen plus 3% |
| | | | | | | sucrose and/or basal media |
| | | | | | | minus nitrogen plus 3% |
| | | | | | | sucrose and 1 mM glutamine |
| G30 | 226 | Arabidopsis | G1792 | Epidermal | Altered | Increased tolerance to low |
| | | thaliana | | LTP1 | nutrient uptake | nitrogen conditions |
| G1795 | 224 | Arabidopsis | G1792 | Vascular | Altered | Increased tolerance to low |
| | | thaliana | | SUC2 | nutrient uptake | nitrogen conditions |
| G3516 | 240 | Zea mays | G1792 | Constitutive | Altered | Altered C/N sensing: |
| | | | | 35S | nutrient uptake | increased tolerance to basal |
| | | | | | | media minus nitrogen plus 3% |
| | | | | | | sucrose and/or basal media |
| | | | | | | minus nitrogen plus 3% |
| | | | | | | sucrose and 1 mM glutamine |
| G3520 | 242 | Glycine max | G1792 | Constitutive | Altered | Altered C/N sensing: |
| | | | | 35S | nutrient uptake | increased tolerance to basal |
| | | | | | | media minus nitrogen plus 3% |
| | | | | | | sucrose and/or basal media |
| | | | | | | minus nitrogen plus 3% |
| | | | | | | sucrose and 1 mM glutamine |
| G1752 | 402 | Arabidopsis | G1792 | Constitutive | Tolerance to | Increased tolerance to |
| | | thaliana | | 35S | hyperosmotic | mannitol |
| | | | | | stress | |
| G1795 | 224 | Arabidopsis | G1792 | Vascular | Tolerance to | Increased tolerance to |
| | | thaliana | | SUC2 | hyperosmotic | mannitol |
| | | | | | stress | |
| G3380 | 250 | Oryza sativa | G1792 | Constitutive | Tolerance to | Increased tolerance to |
| | | | | 35S | hyperosmotic | mannitol |
| | | | | | stress | |
| G3739 | 248 | Zea mays | G1792 | Constitutive | Tolerance to | Increased tolerance to |
| | | | | 35S | hyperosmotic | mannitol |
| | | | | | stress | |
| G3381 | 234 | Oryza sativa | G1792 | Constitutive | Tolerance to | Increased tolerance to |
| | | | | 35S | hyperosmotic | mannitol |
| | | | | | stress | |
| G3383 | 228 | Oryza sativa | G1792 | Constitutive | Tolerance to | Increased tolerance to |
| | | | | 35S | hyperosmotic | mannitol |
| | | | | | stress | |
| G3519 | 232 | Glycine max | G1792 | Constitutive | Tolerance to | Increased tolerance to |
| | | | | 35S | hyperosmotic | mannitol |
| | | | | | stress | |
| G1792 | 222 | Arabidopsis | G1792 | Constitutive | Altered root | Increased root hair |
| | | thaliana | | 35S | morphology | |
| G1792 | 222 | Arabidopsis | G1792 | Constitutive | Altered root | Increased root mass |
| | | thaliana | | 35S | morphology | |
| G3515 | 238 | Oryza sativa | G1792 | Constitutive | Altered root | Increased root hair |
| | | | | 35S | morphology | |
| G3515 | 238 | Oryza sativa | G1792 | Constitutive | Altered root | Increased root mass |
| | | | | 35S | morphology | |
| G30 | 226 | Arabidopsis | G1792 | Dex induced | Resistance to | Increased resistance to |
| | | thaliana | | | Sclerotinia | Sclerotinia |
| G30 | 226 | Arabidopsis | G1792 | Leaf RBCS3 | Resistance to | Increased resistance to |
| | | thaliana | | | Sclerotinia | Sclerotinia |
| G1791 | 230 | Arabidopsis | G1792 | Dex induced | Resistance to | Increased resistance to |
| | | thaliana | | | Sclerotinia | Sclerotinia |
| G1795 | 224 | Arabidopsis | G1792 | Epidermal | Resistance to | Increased resistance to |
| | | thaliana | | LTP1 | Sclerotinia | Sclerotinia |
| G1795 | 224 | Arabidopsis | G1792 | Leaf RBCS3 | Resistance to | Increased resistance to |
| | | thaliana | | | Sclerotinia | Sclerotinia |
| G1795 | 224 | Arabidopsis | G1792 | Epidermal- | Resistance to | Increased resistance to |
| | | thaliana | | specific | Sclerotinia | Sclerotinia |
| | | | | CUT1 | | |
| G1266 | 254 | Arabidopsis | G1792 | Constitutive | Resistance to | Increased resistance to |
| | | thaliana | | 35S | Sclerotinia | Sclerotinia |
| G3381 | 234 | Oryza sativa | G1792 | Constitutive | Resistance to | Increased resistance to |
| | | | | 35S | Sclerotinia | Sclerotinia |
| G3518 | 246 | Glycine max | G1792 | Constitutive | Tolerance to | Increased tolerance to NaCl |
| | | | | 35S | sodium | |
| | | | | | chloride | |
| G3724 | 188 | Glycine max | G1792 | Constitutive | Tolerance to | Increased tolerance to NaCl |
| | | | | 35S | sodium | |
| | | | | | chloride | |
| G3737 | 236 | Oryza sativa | G1792 | Constitutive | Tolerance to | Increased tolerance to NaCl |
| | | | | 35S | sodium | |
| | | | | | chloride | |
| G3724 | 188 | Glycine max | G1792 | Constitutive | Tolerance to | Increased tolerance to sugar |
| | | | | 35S | hyperosmotic | |
| | | | | | stress | |
| G3739 | 248 | Zea mays | G1792 | Constitutive | Tolerance to | Increased tolerance to sugar |
| | | | | 35S | hyperosmotic | |
| | | | | | stress | |
| G2053 | 330 | Arabidopsis | G2053 | Constitutive | Altered | Early flowering |
| | | thaliana | | 35S | flowering time | |
| G2053 | 330 | Arabidopsis | G2053 | Constitutive | Drought | Increased tolerance to drought |
| | | thaliana | | 35S | tolerance | in soil assays |
| G516 | 334 | Arabidopsis | G2053 | Constitutive | Tolerance to | Increased tolerance to |
| | | thaliana | | 35S | hyperosmotic | mannitol |
| | | | | | stress | |
| G516 | 334 | Arabidopsis | G2053 | Constitutive | Cold tolerance | Increased tolerance to cold |
| | | thaliana | | 35S | | |
| G2999 | 256 | Arabidopsis | G2999 | Constitutive | Cold tolerance | Increased tolerance to cold |
| | | thaliana | | 35S | | |
| G2989 | 280 | Arabidopsis | G2999 | Constitutive | Cold tolerance | Increased tolerance to cold |
| | | thaliana | | 35S | | |
| G2990 | 284 | Arabidopsis | G2999 | Constitutive | Cold tolerance | Increased tolerance to cold |
| | | thaliana | | 35S | | |
| G2992 | 286 | Arabidopsis | G2999 | Constitutive | Cold tolerance | Increased tolerance to cold |
| | | thaliana | | 35S | | |
| G2997 | 264 | Arabidopsis | G2999 | Constitutive | Cold tolerance | Increased tolerance to cold |
| | | thaliana | | 35S | | |
| G3002 | 290 | Arabidopsis | G2999 | Constitutive | Cold tolerance | Increased tolerance to cold |
| | | thaliana | | 35S | | |
| G3685 | 274 | Oryza sativa | G2999 | Constitutive | Cold tolerance | Increased tolerance to cold |
| | | | | 35S | | |
| G3686 | 268 | Oryza sativa | G2999 | Constitutive | Cold tolerance | Increased tolerance to cold |
| | | | | 35S | | |
| G2989 | 280 | Arabidopsis | G2999 | Constitutive | Drought | Increased tolerance to drought |
| | | thaliana | | 35S | tolerance | in soil assays |
| G2989 | 280 | Arabidopsis | G2999 | Constitutive | Drought | Increased tolerance to |
| | | thaliana | | 35S | tolerance | dehydration |
| G2989 | 280 | Arabidopsis | G2999 | Constitutive | Drought | Increased tolerance to drought |
| | | thaliana | | 35S | tolerance | in soil assays |
| G2990 | 284 | Arabidopsis | G2999 | Constitutive | Drought | Increased tolerance to drought |
| | | thaliana | | 35S | tolerance | in soil assays |
| G3676 | 266 | Zea mays | G2999 | Constitutive | Drought | Increased tolerance to |
| | | | | 35S | tolerance | dehydration |
| G3686 | 268 | Oryza sativa | G2999 | Constitutive | Drought | Increased tolerance to drought |
| | | | | 35S | tolerance | in soil assays |
| G3002 | 290 | Arabidopsis | G2999 | Constitutive | Heat tolerance | Increased tolerance to heat |
| | | thaliana | | 35S | | |
| G3690 | 262 | Oryza sativa | G2999 | Constitutive | Heat tolerance | Increased tolerance to heat |
| | | | | 35S | | |
| G2999 | 256 | Arabidopsis | G2999 | GAL4 N- | Altered | Early flowering |
| | | thaliana | | term (Super | flowering time | |
| | | | | Active) | | |
| G3000 | 260 | Arabidopsis | G2999 | Constitutive | Altered | Early flowering |
| | | thaliana | | 35S | flowering time | |
| G3676 | 266 | Zea mays | G2999 | Constitutive | Altered | Early flowering |
| | | | | 35S | flowering time | |
| G3686 | 286 | Oryza sativa | G2999 | Constitutive | Altered | Early flowering |
| | | | | 35S | flowering time | |
| G2990 | 284 | Arabidopsis | G2999 | Constitutive | Altered | Decreased ABA sensitivity |
| | | thaliana | | 35S | hormone | |
| | | | | | sensitivity | |
| G2992 | 286 | Arabidopsis | G2999 | Constitutive | Altered | Decreased ABA sensitivity |
| | | thaliana | | 35S | hormone | |
| | | | | | sensitivity | |
| G2995 | 288 | Arabidopsis | G2999 | Constitutive | Altered | Decreased ABA sensitivity |
| | | thaliana | | 35S | hormone | |
| | | | | | sensitivity | |
| G2999 | 256 | Arabidopsis | G2999 | Leaf RBCS3 | Altered | Decreased ABA sensitivity |
| | | thaliana | | | hormone | |
| | | | | | sensitivity | |
| G3685 | 274 | Oryza sativa | G2999 | Constitutive | Altered | Decreased ABA sensitivity |
| | | | | 35S | hormone | |
| | | | | | sensitivity | |
| G2995 | 288 | Arabidopsis | G2999 | Constitutive | Tolerance to | Increased tolerance to |
| | | thaliana | | 35S | hyperosmotic | mannitol |
| | | | | | stress | |
| G3690 | 262 | Oryza sativa | G2999 | Constitutive | Tolerance to | Increased tolerance to |
| | | | | 35S | hyperosmotic | mannitol |
| | | | | | stress | |
| G2999 | 256 | Arabidopsis | G2999 | Leaf RBCS3 | Tolerance to | Increased tolerance to sucrose |
| | | thaliana | | | hyperosmotic | |
| | | | | | stress | |
| G2995 | 288 | Arabidopsis | G2999 | Constitutive | Tolerance to | Increased tolerance to sucrose |
| | | thaliana | | 35S | hyperosmotic | |
| | | | | | stress | |
| G2996 | 270 | Arabidopsis | G2999 | Leaf RBCS3 | Tolerance to | Increased tolerance to sucrose |
| | | thaliana | | | hyperosmotic | |
| | | | | | stress | |
| G2991 | 282 | Arabidopsis | G2999 | Constitutive | Altered root | Increased root mass |
| | | thaliana | | 35S | morphology | |
| G2995 | 288 | Arabidopsis | G2999 | Constitutive | Tolerance to | Increased tolerance to NaCl |
| | | thaliana | | 35S | sodium | |
| | | | | | chloride | |
| G3676 | 266 | Zea mays | G2999 | Constitutive | Tolerance to | Increased tolerance to NaCl |
| | | | | 35S | sodium | |
| | | | | | chloride | |
| G3681 | 278 | Zea mays | G2999 | Constitutive | Tolerance to | Increased tolerance to NaCl |
| | | | | 35S | sodium | |
| | | | | | chloride | |
| G3760 | 324 | Zea mays | G3086 | Constitutive | Tolerance to | Increased tolerance to NaCl |
| | | | | 35S | sodium | |
| | | | | | chloride | |
| G2555 | 318 | Arabidopsis | G3086 | Constitutive | Heat tolerance | Increased tolerance to heat |
| | | thaliana | | 35S | | |
| G3750 | 326 | Oryza sativa | G3086 | Constitutive | Heat tolerance | Increased tolerance to heat |
| | | | | 35S | | |
| G2555 | 318 | Arabidopsis | G3086 | Constitutive | Cold tolerance | Increased tolerance to cold |
| | | thaliana | | 35S | | |
| G2766 | 322 | Arabidopsis | G3086 | Constitutive | Cold tolerance | Increased tolerance to cold |
| | | thaliana | | 35S | | |
| G3086 | 292 | Arabidopsis | G3086 | Constitutive | Cold tolerance | Increased tolerance to cold |
| | | thaliana | | 35S | | |
| G3755 | 302 | Zea mays | G3086 | Constitutive | Cold tolerance | Increased tolerance to cold |
| | | | | 35S | | |
| G3760 | 324 | Zea mays | G3086 | Constitutive | Cold tolerance | Increased tolerance to cold |
| | | | | 35S | | |
| G3766 | 304 | Glycine max | G3086 | Constitutive | Cold tolerance | Increased tolerance to cold |
| | | | | 35S | | |
| G3086 | 292 | Arabidopsis | G3086 | Double Over- | Altered | Early flowering |
| | | thaliana | | expression | flowering time | |
| | | | | (with G481) | | |
| G3086 | 292 | Arabidopsis | G3086 | KO | Altered | Late flowering |
| | | thaliana | | | flowering time | |
| G3086 | 292 | Arabidopsis | G3086 | RSI1 | Altered | Early flowering |
| | | thaliana | | | flowering time | |
| G3760 | 324 | Zea mays | G3086 | Constitutive | Altered | Early flowering |
| | | | | 35S | flowering time | |
| G3086 | 292 | Arabidopsis | G3086 | Constitutive | Drought | Increased tolerance to |
| | | thaliana | | 35S | tolerance | dehydration |
| G3750 | 326 | Oryza sativa | G3086 | Constitutive | Drought | Increased tolerance to |
| | | | | 35S | tolerance | dehydration |
| G3750 | 326 | Oryza sativa | G3086 | Constitutive | Drought | Increased tolerance to |
| | | | | 35S | tolerance | dehydration |
| G3765 | 314 | Glycine max | G3086 | Constitutive | Drought | Increased tolerance to drought |
| | | | | 35S | tolerance | in soil assays |
| G3767 | 298 | Glycine max | G3086 | Constitutive | Drought | Increased tolerance to |
| | | | | 35S | tolerance | dehydration |
| G3769 | 296 | Glycine max | G3086 | Constitutive | Drought | Increased tolerance to |
| | | | | 35S | tolerance | dehydration |
| G3771 | 312 | Glycine max | G3086 | Constitutive | Drought | Increased tolerance to |
| | | | | 35S | tolerance | dehydration |
| G3771 | 312 | Glycine max | G3086 | Constitutive | Drought | Increased tolerance to drought |
| | | | | 35S | tolerance | in soil assays |
| G3766 | 304 | Glycine max | G3086 | Constitutive | Drought | Increased tolerance to |
| | | | | 35S | tolerance | dehydration |
| G1134 | 316 | Arabidopsis | G3086 | Constitutive | Altered | Decreased ABA sensitivity |
| | | thaliana | | 35S | hormone | |
| | | | | | sensitivity | |
| G3744 | 300 | Oryza sativa | G3086 | Constitutive | Altered | Decreased ABA sensitivity |
| | | | | 35S | hormone | |
| | | | | | sensitivity | |
| G3750 | 326 | Oryza sativa | G3086 | Constitutive | Altered | Decreased ABA sensitivity |
| | | | | 35S | hormone | |
| | | | | | sensitivity | |
| G3760 | 324 | Zea mays | G3086 | Constitutive | Altered | Decreased ABA sensitivity |
| | | | | 35S | hormone | |
| | | | | | sensitivity | |
| G3765 | 314 | Glycine max | G3086 | Constitutive | Altered | Decreased ABA sensitivity |
| | | | | 35S | hormone | |
| | | | | | sensitivity | |
| G3766 | 304 | Glycine max | G3086 | Constitutive | Altered | Decreased ABA sensitivity |
| | | | | 35S | hormone | |
| | | | | | sensitivity | |
| G3767 | 298 | Glycine max | G3086 | Constitutive | Altered | Decreased ABA sensitivity |
| | | | | 35S | hormone | |
| | | | | | sensitivity | |
| G3768 | 294 | Glycine max | G3086 | Constitutive | Altered | Decreased ABA sensitivity |
| | | | | 35S | hormone | |
| | | | | | sensitivity | |
| G3769 | 296 | Glycine max | G3086 | Constitutive | Altered | Decreased ABA sensitivity |
| | | | | 35S | hormone | |
| | | | | | sensitivity | |
| G3766 | 304 | Glycine max | G3086 | Constitutive | Altered | Early flowering |
| | | | | 35S | flowering time | |
| G3767 | 298 | Glycine max | G3086 | Constitutive | Altered | Early flowering |
| | | | | 35S | flowering time | |
| G3768 | 294 | Glycine max | G3086 | Constitutive | Altered | Early flowering |
| | | | | 35S | flowering time | |
| G3769 | 296 | Glycine max | G3086 | Constitutive | Altered | Early flowering |
| | | | | 35S | flowering time | |
| G3771 | 312 | Glycine max | G3086 | Constitutive | Altered | Early flowering |
| | | | | 35S | flowering time | |
| G3744 | 300 | Oryza sativa | G3086 | Constitutive | Tolerance to | Increased tolerance to sucrose |
| | | | | 35S | hyperosmotic | |
| | | | | | stress | |

[0483] In this Example, unless otherwise indicted, morphological and physiological traits are disclosed in comparison to wild-type control plants. That is, a transformed plant that is described as large and/or drought tolerant is large and more tolerant to drought with respect to a wild-type control plant. When a plant is said to have a better performance than controls, it generally showed less stress symptoms than control plants. The better performing lines may, for example, produce less anthocyanin, or be larger, green, or more vigorous in response to a particular stress, as noted below. Better performance generally implies greater tolerance to a particular biotic or abiotic stress, less sensitivity to ABA, or better recovery from a stress (as in the case of a drought treatment) than controls.

### The G28 Clade

[0484] G1006 (SEQ ID NO: 151 and 152; Arabidopsis thaliana)—Constitutive 35S

[0485] Background. G1006 is a closely-related Arabidopsis homolog of G28. It has been described in the public literature as AtERF2, and has been demonstrated to be induced by ethylene, methyl jasmonate, and pathogens (Fujimoto et al., 2000; Chen et al., 2002; Brown et al., 2003).

[0486] Morphological Observations. G1006 produced dwarfing when overexpressed. Almost all of the lines in each of two different batches were small and slow developing, although in one batch dwarfing was not initially evident. They also typically exhibited dark, shiny leaves.

[0487] Disease Assay Results. Eight 35S::G1006 lines were tested by Sclerotinia plate assay. Four of these lines (305, 308, 315, and 320) showed a small degree of enhanced resistance to Sclerotinia infection.

TABLE 26
G1006 disease assay results:

| | | Project | | | |
|---|---|---|---|---|---|
| Line | PID | Type | Botrytis | Sclerotinia | Erysiphe |
| 302 | P417 | DPF | n/d | wt | n/d |
| 304 | P417 | DPF | n/d | wt | n/d |
| 305 | P417 | DPF | n/d | + | n/d |
| 308 | P417 | DPF | n/d | + | n/d |
| 314 | P417 | DPF | n/d | wt | n/d |
| 315 | P417 | DPF | n/d | + | n/d |
| 318 | P417 | DPF | n/d | wt | n/d |
| 320 | P417 | DPF | n/d | + | n/d |

DPF = direct promoter fusion
n/d = not determined

[0488] Discussion. Lines overexpressing G1006 were generally smaller and slower developing than controls, and had dark green, shiny leaves. These morphological phenotypes were similar to those observed in G28 lines with moderate to high expression levels, and to those observed in a number of G28 orthologs. Four out of eight lines tested showed some degree of enhanced resistance to Sclerotinia infection, indicating that G1006 functions similarly to G28 in disease resistance. Resistance to Botrytis cinerea and powdery mildew have not yet been tested.

[0489] Potential applications. G1006 may be useful for engineering pathogen resistance in crop plants.

G3430 (SEQ ID NO: 167 and 168; Oryza sativa)—Constitutive 35S

[0490] Background. G3430 is a rice ortholog of G28. The aim of this project was to determine whether overexpression of G3430 in Arabidopsis produces comparable effects to those of G28 overexpression.

[0491] Morphological Observations. In the first batch of plants, all eleven lines had wavy leaves in the vegetative phase. All lines were also smaller and darker green, when compared to controls (except line 304 which was marginally large). All lines in this first batch also had shiny leaves and were late developing.

[0492] The second batch of 35S::G3430 plants showed no consistent differences to controls. An exception was line 322, which was small and dark green and died prior to bolting. All plants showed slightly wavy leaves.

[0493] Disease Assay Results. Ten 35S::G3430 lines were tested by Sclerotinia plate assay. Five lines (306, 308, 328, and 330) displayed increased resistance to this pathogen. Seven of 10 lines were moderately to highly resistant to Erysiphe in a soil-based assay as compared to controls.

TABLE 27
35S::G3430 disease assay results:

| | | Project | | | |
|---|---|---|---|---|---|
| Line | PID | Type | Botrytis | Sclerotinia | Erysiphe |
| 306 | P21267 | DPF | + | + | +++ |
| 308 | P21267 | DPF | wt | + | +++ |
| 321 | P21267 | DPF | + | wt | +++ |
| 323 | P21267 | DPF | wt | wt | wt |
| 324 | P21267 | DPF | wt | wt | ++ |
| 325 | P21267 | DPF | wt | + | wt |
| 326 | P21267 | DPF | wt | wt | +++ |
| 327 | P21267 | DPF | wt | wt | wt |
| 328 | P21267 | DPF | wt | + | ++ |
| 330 | P21267 | DPF | wt | + | +++ |

DPF = direct promoter fusion
n/d = not determined

[0494] Discussion. Overexpression of G3430 produced inconsistent effects on Arabidopsis morphology. One batch of 35S::G3430 lines was small, dark green, and late developing, while a second batch was not significantly different from controls. High expressing 35S::G28 plants and most G28 orthologs tested show a small, dark green, late flowering phenotype, suggesting that the phenotype seen in the first set of transgenic plants is accurate. The expression of this phenotype may vary depending on growth conditions.

[0495] Ten 35S::G3430 lines have been tested in disease assays to date. Five of these lines showed enhanced resistance to Sclerotinia in a plate assay; seven of these lines showed enhanced resistance to Erysiphe, and two of the lines resistant to Erysiphe were also resistant to Botrytis. Several lines are resistant to multiple pathogens. The lines tested came from both batches of T1 plants.

[0496] Potential applications. G3430 may be used to increase disease resistance or modify flowering time in plants.

G3659 (SEQ ID NO: 149 and 150; Brassica oleracea)—Constitutive 35S

[0497] Background. G3659 was included in the disease lead advancement program as a Brassica oleracea ortholog of G28. The aim of this project was to determine whether overexpression of G3659 in Arabidopsis produces comparable effects to those of G28 overexpression.

[0498] Morphological Observations. Overexpression of G3659 produced plants that were small, dark green and late developing.

[0499] Disease Assay Results. Of the 35S::G3659 lines tested in a plate assay for Sclerotinia resistance; two lines showed some degree of resistance. Four lines tested in an Erysiphe soil assay were more resistant to this pathogen than controls, with the level of resistance ranging from somewhat to highly resistant.

TABLE 28
35S::G3659 Disease assay results:

| | | Project | | | |
|---|---|---|---|---|---|
| Line | PID | Type | Botrytis | Sclerotinia | Erysiphe |
| 301 | P23452 | DPF | wt | wt | wt |
| 303 | P23452 | DPF | n/d | wt | wt |
| 305 | P23452 | DPF | wt | wt | ++ |
| 306 | P23452 | DPF | + | wt | + |
| 308 | P23452 | DPF | wt | + | +++ |
| 310 | P23452 | DPF | n/d | + | +++ |
| 311 | P23452 | DPF | n/d | wt | wt |
| 315 | P23452 | DPF | n/d | wt | wt |
| 316 | P23452 | DPF | n/d | wt | wt |
| 317 | P23452 | DPF | n/d | wt | wt |

DPF = direct promoter fusion
n/d = not determined

[0500] Discussion. Overexpression of G3659 produced plants that were small, dark green and late developing. These morphological effects are similar to the phenotype observed in high expressing 35S::G28 lines and plants expressing most G28 orthologs. Ten 35S::G3659 lines have been tested in a plate assay for Sclerotinia resistance, with two lines showing some degree of resistance. Of the ten 35S::G3659 lines that have been tested in a plate assay for Sclerotinia resistance, three lines showed greater resistance than controls.

[0501] Potential applications. Based on the results obtained so far, G3659 may be used to increase disease resistance or modify flowering time in plants.

G3660 (SEQ ID NO: 157 and 158. Brassica oleracea)—Constitutive 35S

[0502] Background. G3660 is a Brassica oleracea ortholog of G1006, a closely-related Arabidopsis homolog of G28. The aim of this project was to determine whether overexpression of G3660 in Arabidopsis produces comparable effects to those of G28 overexpression.

[0503] Morphological Observations. The overexpression of G3660 consistently induced dwarfing in Arabidopsis. Seventy-five percent of the T1 transformants were noticeably small at seven days. All lines isolated were small, dark green and had shiny leaves. Plant size and flowering time were variable, although all lines were small and flowered late to some degree.

[0504] Disease Assay Results. Ten 35S::G3660 lines were tested by Sclerotinia plate assay. Three lines (302, 308, and 340) showed a degree of enhanced resistance to Sclerotinia infection. Ten lines were tested in an Erysiphe soil assay, and all lines tested were moderately to highly resistant to this pathogen.

TABLE 29
35S::G3660 Disease assay results:

| | | Project | | | |
|---|---|---|---|---|---|
| Line | PID | Type | Botrytis | Sclerotinia | Erysiphe |
| 301 | P23418 | DPF | n/d | wt | +++ |
| 302 | P23418 | DPF | wt | + | +++ |
| 305 | P23418 | DPF | n/d | wt | ++ |
| 307 | P23418 | DPF | n/d | wt | +++ |
| 308 | P23418 | DPF | + | + | +++ |
| 321 | P23418 | DPF | n/d | wt | +++ |
| 324 | P23418 | DPF | n/d | wt | +++ |
| 327 | P23418 | DPF | n/d | wt | +++ |
| 330 | P23418 | DPF | n/d | wt | + |
| 340 | P23418 | DPF | + | + | +++ |

DPF = direct promoter fusion
n/d = not determined

[0505] Discussion. Overexpression of G3660 produced plants that were small, dark green and late developing. These morphological effects were similar to the phenotype observed in high expressing 35S::G28 plants and plants expressing most closely-related G28 homologs. Ten 35S::G3660 lines have been tested in a plate assay for Sclerotinia resistance; three lines showed greater resistance than controls. In a soil based assay, all ten lines tested were more resistant to Erysiphe than controls.

[0506] Potential applications. Based on the results obtained so far, G3660 may be used to increase disease resistance or modify flowering time in plants.

G3661 (SEQ ID NO: 161 and 162; Zea mays)—Constitutive 35S

[0507] Background. G3661 is maize ortholog of G28. The aim of this project is to determine whether overexpression of G3661 in Arabidopsis produces comparable effects to those of G28 overexpression.

[0508] Morphological Observations. Overexpression of G3661 produced plants that were small, dark green and late developing.

[0509] Disease Array Results. Five of 10 lines showed evidence of greater tolerance to Erysiphe than controls in plate-based assays, including two lines that were highly resistant.

TABLE 30
35S::G3661 Disease assay results:

| | | Project | | | |
|---|---|---|---|---|---|
| Line | PID | Type | Botrytis | Sclerotinia | Erysiphe |
| 301 | P23419 | DPF | n/d | wt | wt |
| 302 | P23419 | DPF | n/d | − | + |
| 306 | P23419 | DPF | n/d | wt | +++ |
| 308 | P23419 | DPF | n/d | wt | + |
| 311 | P23419 | DPF | n/d | wt | + |
| 312 | P23419 | DPF | n/d | wt | +++ |
| 314 | P23419 | DPF | n/d | wt | n/d |
| 321 | P23419 | DPF | n/d | − | n/d |
| 322 | P23419 | DPF | n/d | wt | n/d |
| 323 | P23419 | DPF | n/d | wt | wt |

DPF = direct promoter fusion
n/d = not determined

[0510] Discussion. The morphological effects conferred by G3661 are similar to the phenotype observed in high expressing 35S::G28 plants and plants expressing most closely-related G28 homologs. While some of these overexpressors were much more resistant to Erysiphe than controls, two lines were somewhat more sensitive to Sclerotinia. A screening step to eliminate those plants that are more sensitive to the latter pathogen than controls would likely be advantageous.

[0511] Potential applications. Based on the results obtained so far, G3661 may be used to increase Erysiphe resistance or modify flowering time in plants.

G3717 (SEQ ID NO: 153 and 154; Glycine max)—Constitutive 35S

[0512] Background. G3717 was included in the disease lead advancement program as a soy ortholog of G28. The aim of this project was to determine whether overexpression of G3717 in Arabidopsis produces comparable effects to those of G28 overexpression.

[0513] Morphological Observations. Overexpression of G3717 produced plants that were severely dwarfed, dark green, and late developing. A small, dark green, late developing phenotype is common among plants expressing members of the G28 clade, but the effects of G3717 are particularly severe.

[0514] Disease Assay Results. In a soil based assay, 35S::G3717 lines were found to be generally more resistant than wild-type controls to Erysiphe. For five of the lines tested, the level of resistance conferred as compared to controls was highly significant.

TABLE 31
35S::G3717 Disease assay results:

| | | Project | | | |
|---|---|---|---|---|---|
| Line | PID | Type | Botrytis | Sclerotinia | Erysiphe |
| 321 | P23421 | DPF | n/d | n/d | +++ |
| 323 | P23421 | DPF | n/d | wt | +++ |
| 343 | P23421 | DPF | n/d | n/d | +++ |
| 344 | P23421 | DPF | n/d | n/d | +++ |
| 345 | P23421 | DPF | n/d | wt | + |
| 346 | P23421 | DPF | n/d | n/d | wt |
| 365 | P23421 | DPF | n/d | n/d | +++ |
| 367 | P23421 | DPF | n/d | n/d | ++ |

DPF = direct promoter fusion
n/d = not determined

[0515] Discussion. Due to these deleterious effects on growth, the disease resistance conferred by G3717 may be best utilized if expression of this gene is optimized with a judicious regulatory mechanism.

[0516] Potential applications. Based on the results obtained so far, G3717 may be used to increase disease resistance in plants.

G3718 (SEQ ID NO: 155 and 156; Glycine max)—Constitutive 35S

[0517] Background. G3718 was included in the disease lead advancement program as a soy ortholog of G28. The aim of this project was to determine whether overexpression of G3718 in Arabidopsis produces comparable effects to those of G28 overexpression.

[0518] Morphological Observations. Overexpression of G3718 produced plants that were small, dark green and late developing.

[0519] Disease Assay Results. Of the 35S::G3718 lines tested in a plate assay for Sclerotinia resistance; two lines showed some degree of resistance. Five 35S::G3718 lines were more resistant than wild type in soil-based assays.

TABLE 32
35S::G3718 Disease assay results:

| | | Project | | | |
|---|---|---|---|---|---|
| Line | PID | Type | Botrytis | Sclerotinia | Erysiphe |
| 302 | P23423 | DPF | n/d | wt | +++ |
| 303 | P23423 | DPF | n/d | wt | wt |
| 304 | P23423 | DPF | n/d | wt | wt |
| 305 | P23423 | DPF | n/d | wt | wt |
| 306 | P23423 | DPF | wt | + | wt |
| 307 | P23423 | DPF | wt | wt | ++ |
| 308 | P23423 | DPF | n/d | wt | ++ |
| 309 | P23423 | DPF | n/d | wt | +++ |
| 313 | P23423 | DPF | + | + | n/d |
| 324 | P23423 | DPF | n/d | n/d | +++ |

DPF = direct promoter fusion
n/d = not determined

[0520] Discussion. The morphological effects conferred by G3718 were similar to the phenotype observed in high expressing 35S::G28 lines and plants expressing most closely-related G28 homologs. Due to these deleterious effects on growth, the disease resistance conferred by G3718 may be best utilized if expression of this gene is optimized with a judicious regulatory mechanism.

[0521] Potential applications. Based on the results obtained so far, G3718 may be used to increase disease resistance or modify flowering time in plants.

### The G47 Clade

[0522] G2133 (SEQ ID NO: 175 and 176; Arabidopsis thaliana)—Constitutive 35S

[0523] Two new sets of 35S::G2133 direct promoter fusion lines have been obtained. In both cases, the majority of lines were markedly dwarfed at early stages and exhibited vertically oriented leaves. Many of the lines were late flowering, and at late stages a significant number of lines showed fleshy, succulent, leaves and stems and reduced apical dominance. These effects were similar to those seen in 35S::G47 lines.

[0524] Morphological Observations. Many of the 35S::G2133 lines at early stages were small. Some lines flowered late and showed upright leaves. A few other lines had vitreous inner rosette leaves. Several lines showed fleshy leaves and sterns and had a reduction in apical dominance at late stages. Four lines were phenotypically similar to wild-type.

[0525] Physiology (Plate assays) Results. Five out of ten 35S::G2133 lines were more tolerant to cold in a germination assay. Five lines were also more tolerant to a water deprivation stress, as shown in a severe dehydration plate-based assay.

[0526] Physiology (Soil Drought-Clay Pot) Summary. Numerous independent 35S::G2133 lines have been tested in soil drought assays and each showed more tolerance to and/or better recovery from drought conditions than controls.

TABLE 33
35S::G2133 drought assay results:

| | | Mean | Mean | p-value for | Mean | Mean | p-value for |
|---|---|---|---|---|---|---|---|
| | Project | drought | drought | drought score | survival for | survival for | difference in |
| Line | Type | score line | score control | difference | line | control | survival |
| 3 | DPF | 5.3 | 0.71 | 0.000018* | 0.7 | 0.17 | 0.00000000000000000033* |
| 4 | DPF | 4.2 | 0.71 | 0.0000071* | 0.54 | 0.17 | 0.0000000000000051* |
| 5 | DPF | 6 | 0.71 | 0.00051* | 0.88 | 0.17 | 0.00000000000049* |
| 311 | DPF | 1.5 | 0.7 | 0.04* | 0.26 | 0.1 | 0.00057* |
| 311 | DPF | 1 | 0.3 | 0.022* | 0.16 | 0.05 | 0.0051* |
| 312 | DPF | 1.4 | 0.9 | 0.27 | 0.21 | 0.16 | 0.22 |
| 312 | DPF | 1.6 | 0.6 | 0.033* | 0.21 | 0.093 | 0.006* |
| 316 | DPF | 1.6 | 0.1 | 0.00051* | 0.29 | 0.036 | 0.0000011* |
| 316 | DPF | 1.4 | 0.5 | 0.022* | 0.17 | 0.071 | 0.018* |
| MIXED | DPF | 1.6 | 0.9 | 0.18 | 0.25 | 0.14 | 0.017* |

DPF = direct promoter fusion
Survival = proportion of plants in each pot that survived
Drought scale: 6 (highest score) = no stress symptoms, 0 (lowest score; most severe effect) = extreme stress symptoms
*line performed better than control (significant at P < 0.11)

[0527] Discussion. As expected, 35S::G2133 overexpressing lines were dwarfed, had fleshy leaves and stems, and reduced apical dominance later in development. G2133 overexpressors showed improved cold germination and greater tolerance to water deprivation as compared to controls in plates and soil-based drought assays.

[0528] Potential applications. G2133 provides enhanced cold germination and drought tolerance. The gene might also be used to modify developmental traits such as flowering time and inflorescence architecture.

G2133 (SEQ ID NO: 175 and 176; Arabidopsis thaliana)—Leaf RBCS3

[0529] Background. G2133 is a very closely related homolog of G47, having 65% sequence identity over the entire length of the protein (138 amino acids), and had previously shown excellent drought tolerance in soil assays. These proteins presumably have diverged relatively recently in Arabidopsis. The objective of this project was to determine whether leaf mesophyll-specific expression of G2133 would separate the stress tolerance and morphological phenotypes.

[0530] Morphological Observations. Twenty RBCS3::G2133 lines have been generated using a two-component approach. Considerable size variation was seen among these T1 plants, but overall, no consistent differences to controls were noted. The severe dwarfing that is apparent in 35S::G2133 lines was not seen.

[0531] Physiology (Plate assays) Results. RBCS3::G2133 lines were more tolerant relative to wild-type in a severe plate-based dehydration assay (three lines out of ten), and in a growth assay under chilling conditions (six lines out of ten).

[0532] Discussion. Two-component RBCS3::G2133 T1 lines have been found to have significantly varied plant size, but no consistent differences with control were observed. Thus, dwarfing and the fleshy leaves and stems observed with 35S ectopic expression were eliminated using the RBCS3 promoter. RBCS3::G2133 overexpressing lines also showed tolerance to severe dehydration stress and improved growth in cold conditions in plate assays. Thus, stress tolerance was retained with elimination of significant morphological abnormalities. It should also be noted that we obtained cold-stress tolerance with the RBCS3 lines for the related gene, G47.

G2133 (SEQ ID NO: 175 and 176; Arabidopsis thaliana)—Stress Inducible RD29A—Line 5

[0533] Background. The objective of this project was to determine whether drought-inducible expression of G2133 would support stress tolerance without adverse morphological phenotypes.

[0534] Morphological Observations. RD29A::G2133 two-component lines plants were noted to be marginally smaller than wild-type at the rosette stage, but otherwise appeared wild type.

[0535] Physiology (Plate assays) Results. Three out of ten RD29A::G2133 lines were more tolerant to a severe plate based dehydration stress compared to wild-type control seedlings.

[0536] Physiology (Soil Drought-Clay Pot) Summary. The three lines that were more tolerant to dehydration stress were tested in soil based assays and one of these showed a repeatedly better survival than controls across two different plantings. Importantly, the T2 lines tested in soil drought assays showed no clear developmental abnormalities or size reductions.

[0537] Discussion. Two-component RD29A (line 5)::G2133 overexpressors lines are marginally smaller than control plants at the rosette stage, but otherwise are unaltered in growth and development. Three lines exhibited increased water deprivation tolerance (desiccation tolerance in the plate-based extreme dehydration assay), one of these lines showed improved drought tolerance in a soil assay, and the T2 lines showed no developmental abnormalities or size reductions

[0538] Potential applications. RD29A::G2133 overexpression provides enhanced cold germination and water deprivation tolerance with few or no adverse morphological or developmental defects. The gene might also be used to modify developmental traits such as flowering time and inflorescence architecture.

G47 (SEQ ID NO: 173 and 174; Arabidopsis thaliana)—Leaf RBCS3

[0539] Background. G47 was included in the drought program based on the enhanced vegetative yield and the drought tolerance shown by 35S::G47 lines.

[0540] The objective of this project was to determine whether leaf mesophyll-specific expression of G47 would separate the stress tolerance and morphological phenotypes characteristic of G47 overexpression.

[0541] Morphological Observations. RBCS3::G47 lines have been generated using a two-component approach, and three different batches of T1 lines have been obtained. Some of these seedlings were slightly small at early stages, but severe dwarfing effects were not observed. Some lines were late flowering. A considerable number of lines showed no consistent differences in morphology to controls.

[0542] Physiology (Plate assays) Results. Six of 10 RBCS3::G47 lines were more tolerant to salt than wild-type controls in germination assays. RBCS3::G47 overexpressors were also observed to be more tolerant to hyperosmotic stress; 3 of 10 lines were more tolerant to mannitol and 3 of 10 lines were more tolerant to sucrose than controls. Six of 10 lines showed better germination in the cold than wild-type in plate assays. Overall, stress tolerance similar to that observed with 35S::G47 lines was retained with elimination of significant morphological abnormalities. It should also be noted that we obtained cold-stress and hyperosmotic stress (desiccation) tolerance with the RBCS3 lines for the related gene, G2133.

[0543] Discussion. Two-component RBCS3::G47 lines have been found to have nearly normal growth and development compared with controls. Some lines were slightly small early in development, and some lines showed a late flowering phenotype. However, the severe dwarfing, and leaf and stem thickness, seen with 35S::G47 lines, were not observed.

[0544] Potential applications. G47 provides enhanced cold and drought tolerance. The utility of leaf mesophyll expression for stress tolerance is promising. The RBCS3::G47 combination might also be useful for manipulating flowering time.

G47 (SEQ ID NO: 173 and 174; Arabidopsis thaliana)—Stress Inducible RD29A—Line 5

[0545] Background. The objective of this project was to determine whether drought-inducible expression of G47 via the RD29A promoter would support stress tolerance without adverse morphological phenotypes.

[0546] Morphological observations. Two-component RD29A::G47 lines were somewhat dwarfed early in development, although significant size variation was observed. Some lines were later flowering.

[0547] Physiology (Plate assays) Results. Half of the lines (5 of 10) performed better than controls in a water deprivation, severe dehydration plate assay, and 3 of 10 lines were insensitive to ABA in a germination assay. This contrasts with the 35S::G47 (direct fusion) lines which showed little increased stress tolerance in plate assays.

[0548] Physiology (Soil Drought-Clay Pot) Summary. One RD29A::G47 line of three lines examined exhibited significantly better recovery than control plants is a water deprivation, soil-based drought assay.

[0549] Potential applications. At this stage of the analysis, we have shown that drought-inducible expression of G47 can significantly ameliorate growth abnormalities observed using the 35S promoter, and that some stress tolerance is retained. The RD29A::G47 lines were not completely wild-type, which might be attributed to G47 expression from the RD29A promoter in embryos and young seedlings.

G47 (SEQ ID NO: 173 and 174; Arabidopsis thaliana)—Super Activation (N-GAL4-TA)

[0550] Background. The aim of this study was to determine whether addition of a strong transcription activation domain from the yeast GAL4 gene could enhance potency of the 35S::G47 phenotype.

[0551] Morphological Observations. 35S::N-GAL4-G47 T1 lines showed a mild acceleration in the onset of flowering, relative to wild-type controls. In other regards, these lines appeared wild type.

[0552] Physiology Summary. In assays performed thus far, nine of ten 35S::N-GAL4-G47 lines tested were more tolerant to mannitol than wild-type control plants, indicating a hyperosmotic stress tolerant phenotype.

[0553] Discussion. In contrast to 35S::G47 lines, which had multiple developmental alterations including delayed flowering, the 35S::N-GAL4-TA-G47 lines flowered earlier than controls. In other aspects of development, these lines appeared similar to wild type.

[0554] Potential applications. At this stage of the analysis, the N-terminal GAL4 fusion was found to mitigate undesirable morphological changes, but we have not determined the utility of an N-terminal fusion for drought tolerance. Based on the morphological effects observed, the GAL-G47 fusion can be used to modify flowering time. The mannitol tolerance results indicate that the GAL-G47 fusion may be used to confer drought and drought-related stress tolerance in plants.

G47 (SEQ ID NO: 173 and 174; Arabidopsis thaliana)—Vascular SUC2

[0555] Background. The objective of this project was to determine whether phloem companion cell-specific expression of G47 would separate the stress tolerance and morphological phenotypes observed with 35S::G47 lines.

[0556] Morphological Observations. SUC2::G47 two-component system transformants were mostly wild-type at early stages, but a significant number of the lines were late flowering and exhibited rather dark leaves versus controls. A number of lines were late flowering and/or showed dark leaves. The stems from these plants were also potentially thicker (detailed measurements were not taken) than those of controls.

[0557] Physiology Results. Three of 10 SUC2::G47 lines were more tolerant than wild type controls in severe desiccation assays.

[0558] Discussion: Two-component SUC2::G47 lines displayed wild-type growth at early stages, but many lines were delayed in flowering. Later in development, enlarged and greener leaves were observed. The stems of some of these lines may also be somewhat thicker than stems of controls. Thus, expression using the SUC2 promoter eliminates the significant dwarfing effects associated with constitutive overexpression.

[0559] Potential applications. G47 provides enhanced drought tolerance. The utility of phloem companion cell-specific expression for these traits remains to be determined. The morphological phenotypes seen in SUC2::G47 lines indicate that this combination can be useful for modifying developmental traits such as flowering time, leaf size, stem structure, and coloration.

G47 (SEQ ID NO: 173 and 174; Arabidopsis thaliana)—Shoot Apical Meristem STM

[0560] Background. The objective of this study was to determine whether the morphological and stress phenotypes associated with 35S::G47 overexpression could be resolved with meristem-specific expression using the STM promoter.

[0561] Morphological Observations. Two sets of STM::G47 lines have been obtained using the two-component system. Lines 1001-1020 isolated in one STM driver line showed wild-type morphology at all developmental stages. Lines isolated in another STM driver line were small at early stages with a number of the lines showing delayed flowering. At late stages some of the second STM driver lines exhibited larger rosettes than wild type.

[0562] Physiology (Plate assays) Results. In assays performed thus far, 5 of 10 STM::G47 lines were more tolerant to sucrose, and 7 of 10 lines were more tolerant to germination in cold conditions, than wild-type control plants.

[0563] Discussion. STM::G47 overexpression via the two-component system in one driver line yielded plants with growth and development comparable to that of controls. G47 overexpression with a second driver line yielded plants that were generally small early in development, but some of which flowered rather late and developed enlarged leaves at late stages.

[0564] Potential applications. We have shown that meristem-specific expression of G47 can result in normal plants, but have yet to determine whether drought tolerance is retained with this expression pattern. However, it is possible that expression of G47 at high levels in meristems can be useful for modifying developmental traits such as flowering time and leaf size.

G2115 (SEQ ID NO: 405 and 406; Arabidopsis thaliana)—Constitutive 35S

[0565] Background. G2115 was included in the G47 study group as an outlier to help define the specific structural motifs necessary for abiotic stress tolerance and drought tolerance. G2115 lies in a closely-related clade of AP2 transcription factors. The few 35S::G2115 lines tested previously in the earlier genomics program did not show the fleshy stems characteristic of G47 overexpression, and were not found to confer stress-tolerance.

[0566] Morphological Observations. G2115 overexpressing lines showed deleterious effects on morphology; all were dwarfed to varying extents and a number of lines were early flowering. Other lines were slow developing, bolted late, and exhibited various non-specific floral abnormalities.

[0567] Physiology (Plate assays) Results. Four of 10 lines were observed to be more tolerant to cold stress in a germination assay, and 3 of 10 lines were more tolerant than wild-type controls in a cold growth assay.

[0568] Discussion: As was observed in the genomics program, 35S::G2115 overexpressing lines were somewhat dwarfed and showed a variety of morphological defects. Some lines flowered earlier than controls, while other lines flowered later. G2115 overexpressing lines showed improved germination and growth in the cold in plate based assays. At the time of this these lines have not been evaluated for drought tolerance in a soil assay.

[0569] Potential applications: G2115 provides enhanced germination and growth under cold conditions. Given the deleterious effects on development, the gene might require optimization with tissue specific or inducible promoters.

G3643 (SEQ ID NO: 177 and 178; Glycine max)—Constitutive 35S

[0570] Background. G3643 was included as a soybean ortholog of G47. The objective of this project was to determine whether G3643 can condition drought tolerance when expressed in Arabidopsis.

[0571] Morphological Observations. All 35S::G3643 lines were small, particularly at early stages, and a substantial number of lines exhibited delayed flowering. At late stages, several lines were noted to be slightly larger than controls. Overall, the fleshy stem and leaf phenotype was less marked in this set of lines than in 35S::G47 lines.

[0572] Physiology (Plate assays) Results. Three of 10 G3643 overexpressing lines were more tolerant than wild type to cold in a germination assay.

[0573] Physiology (Soil Drought-Clay Pot) Summary. Three independent 35S::G3643 lines have recently been tested in a soil drought assay and each showed more tolerance to and better recovery from drought conditions than controls.

TABLE 34
35S::G3643 drought assay results:

| | | Mean | Mean | p-value for | Mean | Mean | p-value for |
|---|---|---|---|---|---|---|---|
| | Project | drought | drought | drought score | survival for | survival for | difference in |
| Line | Type | score line | score control | difference | line | control | survival |
| 305 | DPF | 1.9 | 1.4 | 0.26 | 0.56 | 0.39 | 0.0043* |
| 307 | DPF | 1.3 | 0.30 | 0.059* | 0.34 | 0.057 | 0.00000017* |
| 313 | DPF | 1.0 | 0 | 0.0058* | 0.23 | 0.0071 | 0.00028* |

DPF = direct promoter fusion
Survival = proportion of plants in each pot that survived
Drought scale: 6 (highest score) = no stress symptoms, 0 (lowest score; most severe effect) = extreme stress symptoms
*line performed better than control (significant at P < 0.11)

[0574] Discussion. 35S::G3643 direct fusion lines were smaller than controls, with a number of lines having delayed flowering compared to controls. Overall, the fleshy stem and leaf phenotype was less marked in this set of lines than in 35S::G47 lines. Improved cold germination was observed in plate assays, and two lines with enhanced cold germination also were more tolerant than controls in soil drought assays.

[0575] Potential applications. Based on the results from stress assays, G3643 provides enhanced cold germination and drought tolerance. However, given the developmental effects of overexpression of this gene, it might require optimization with a tissue specific or inducible promoter.

G3644 (SEQ ID NO: 181 and 182; Oryza sativa)—Constitutive 35S

[0576] Background. G3644 is a rice ortholog of G47. The aim of this project was to determine whether overexpression of G3644 produces comparable effects on morphology and stress tolerance to overexpression of G47.

[0577] Morphological Observations. Dwarfing was apparent in the 35S::G3644 lines at early stages. Many individuals showed large leaves and thick stems that were somewhat reminiscent of those in 35S::G47 lines. However, these features were not apparent in the rest of the lines. Four lines were slightly late flowering. Two lines were noted to be bushy at late stages. In some lines, considerable size variation was apparent early in development, with three lines being particularly small. Later, most of the lines developed enlarged rosettes and rather thick stems.

[0578] Discussion. Direct fusion 35S::G3644 lines had morphological phenotypes similar to 35S::G47 lines: early dwarfing was observed in most lines, and some lines also exhibited thick leaves and stems. Thus, the G3644 proteins shares some activity with G47. No stress tolerance was observed in any plate assay, and surprisingly, the G3644 overexpressing lines were consistently more sensitive to cold than the controls. This was particularly intriguing, as many genes within the G47 study have produced cold tolerance when overexpressed.

[0579] Potential applications. G3644 yields similar morphological phenotypes to those conditioned by G47, but the stress tolerance phenotypes are different. The utility of G3644 is not clear, but it appears to regulate at least some pathways in common with G47.

G3649 (SEQ. ID NO: 183 and 184; Oryza sativa)—Constitutive 35S

[0580] Background. G3649 is a rice ortholog of G47. The aim of this project was to determine whether G3649 produces comparable effects to G47 on morphology and stress tolerance when overexpressed in Arabidopsis.

[0581] Morphological Observations. 35S::G3649 lines exhibited similar phenotypes to those seen in G47 overexpression lines. The majority of lines showed dwarfing, particularly at early stages, were light green in coloration, slow developing, and had vertically oriented leaves. At later stages, many of the lines were late flowering and produced thick fleshy stems and leaves and had rather short inflorescence internodes. Several lines showed an abnormal branching pattern and short inflorescence internodes.

[0582] Physiology (Plate assays) Results. Three of 14 35S::G3649 lines showed increased cold germination in plate assays relative to wild-type controls.

[0583] Physiology (Soil Drought-Clay Pot) Summary. In soil-based drought assays, at least one line was more tolerant to drought and recovered from drought better than wild-type controls. A second line also recovered better from the drought treatment than controls.

[0584] Discussion. Direct fusion 35S::G3649 lines had morphological phenotypes similar to 35S::G47 lines: early dwarfing was observed in the majority of lines; at late stages, many lines were late flowering and exhibited thick leaves and stems. Based on these phenotypes, this protein appears to have comparable activity to G47.

[0585] Potential applications. G3649 produces similar morphological phenotypes to those conditioned by G47. G3649 appears to regulate at least some pathways in common with G47, and may be used to confer cold and drought tolerance to plants.

The G482 Clade and related Sequences
G481 (SEQ ID NO: 1 and 2; Arabidopsis thaliana)—Constitutive 35S

[0586] Background. G481 was included in the drought program based on the enhanced tolerance of 35S::G481 lines to drought related stress. This gene has been referenced in the public literature as AtHAP3a (Edwards et al., 1998) and NF-YB1 (Gusmaroli et al., 2001; 2002). Other than the expression data in these papers suggesting that the gene is ubiquitously expressed (with high levels in flower and/or silique) no functional data have been published. The aim of this study was to re-assess a larger number of 35S::G481 lines and compare its overexpression effects to those of other genes from the NF-Y family.

[0587] Morphological Observations. We have generated 35S lines for G481 using both the two-component system and a direct promoter fusion approach. Alterations in flowering time and a dark coloration were noted, but these effects were rather variable between different lines and plantings, suggesting that the phenotypes might be critically dependent on the specific level of G481 overexpression and/or were influenced by subtle changes in growth conditions (such as light intensity, temperature, air-flow etc.). In many instances, the 35S::G481 lines flowered at the same times as controls. However, when changes in flowering time were seen, in most cases, the clearest effect was a delay in the onset of flowering. In some lines, though, accelerated flowering was apparent.

[0588] Physiology (Plate assays) Results. Both two component and direct fusion 35S::G481 lines have been tested in plate based assays.

[0589] Initially, a set of ten two component lines were examined. Seedlings from four of these ten lines were less sensitive to ABA in a germination assay. Two of these lines also were more tolerant than wild-type in a cold germination assay.

[0590] Subsequently, a new batch of fifteen 35S::G481 direct promoter-fusion lines were tested. Five of the fifteen lines were more tolerant than controls in a cold germination assay. The same five lines showed enhanced vigor relative to wild-type seedlings on control plates in the absence of a stress treatment. Three of these five lines also showed more tolerance to sucrose in a sucrose germination assay (confirming the result obtained in our earlier genomics program). Three of these five lines were more tolerant than controls in a cold growth assays. Some of the five lines that performed well in the cold germination experiment also were more tolerant than controls in severe dehydration, mannitol and ABA germination assays.

[0591] Discussion. Both 35S::G481 two-component and direct fusion lines have now been extensively examined, and comparable phenotypes were obtained via each of these approaches. Changes in flowering time and a dark coloration were noted, but these effects were rather variable between different lines and plantings, suggesting that the phenotypes might be critically dependent on the specific level of G481 overexpression and/or were influenced by subtle changes in growth conditions (such as light intensity, temperature, air-flow etc.). In many instances, the 35S::G481 lines flowered at the same times as controls. However, when changes in flowering time were seen, in most cases, the clearest effect was a delay in the onset of flowering. In some lines, though, accelerated flowering was apparent. Thus, the switch to flowering appears to be finely balanced and there might be a specific range of G481 activity that determines whether a delay or acceleration of that switch occurs.

[0592] It should be emphasized that we have observed flowering time and stress tolerance-related phenotypes for many of genes from the NF-Y family; it is emerging that broad groups of the genes from across the entire family can influence these traits. Importantly the direction of the flowering time phenotypes do not appear to correlate with stress tolerance, since we have obtained convincing stress tolerance phenotypes with lines that showed either late or early flowering.

[0593] Potential applications. The results of these overexpression studies confirm our earlier conclusion that G481 and the related genes are excellent candidates for improvement of drought related stress tolerance in commercial species. Additionally, G481 related genes could be used to manipulate flowering time. The dark coloration and sucrose germination results obtained with 35S::G481 lines suggest that the gene might influence the regulation of photosynthesis and carbohydrate metabolism. As such, the gene may be used to enhance yield under a range of conditions, and not merely during water limitation.

G481 (SEQ ID NO: 1 and 2; Arabidopsis thaliana)—Vascular SUC2

[0594] Background. The aim of this project was to determine whether expression of G481 from a SUC2 promoter, which predominantly drives expression in a vascular specific pattern, is sufficient to confer stress tolerance that is similar to, or better than, that seen in 35S::G481 lines.

[0595] Morphological Observations. Overexpression of G481 from the SUC2 promoter produced a marked delay in the onset of flowering, dark green coloration, and increased rosette size at later stages of development.

[0596] Two-component lines containing an opLexA::G481 construct were supertransformed into a SUC2::LexA-GAL4TA promoter driver line. The majority of lines showed delayed flowering and dark coloration in both the T1 generation and each of three T2 lines that were examined.

[0597] As an alternative to the 2-component approach, we built a construct (P21522) that contains a direct promoter-fusion for SUC2::G481. The majority of these plants were late flowering and were dark in coloration. These effects were also observed in each of three T2 populations that were examined.

[0598] Physiology (Plate assays) Results. SUC2::G481 lines were more tolerant to cold conditions and a severe dehydration stress in plate based assays. The results were consistent for both direct fusion and two component lines; both sets of lines were more tolerant than controls in these two assays.

[0599] Physiology (Soil Drought-Clay Pot) Summary. Seven independent lines containing a SUC2::G481 direct fusion construct were tested in soil drought assays. One of these lines (#1691) was more tolerant than wild-type controls in two out of four runs of the experiment.

TABLE 35
SUC2::G481 drought assay results:

| | | Mean | Mean | p-value for | Mean | Mean | p-value for |
|---|---|---|---|---|---|---|---|
| | Project | drought | drought | drought score | survival for | survival for | difference in |
| Line | Type | score line | score control | difference | line | control | survival |
| 1691 | DPF | 1.8 | 0.94 | 0.15 | 0.33 | 0.18 | 0.0051* |
| 1691 | DPF | 0.33 | 0.78 | 0.36 | 0.071 | 0.12 | 0.26 |
| 1691 | DPF | 1.2 | 1.0 | 0.49 | 0.079 | 0.13 | 0.18 |
| 1691 | DPF | 2.8 | 0.40 | 0.00020* | 0.78 | 0.064 | 0.000000000000000000000050* |

DPF = direct promoter fusion
Survival = proportion of plants in each pot that survived
Drought scale: 6 (highest score) = no stress symptoms, 0 (lowest score; most severe effect) = extreme stress symptoms
*line performed better than control (significant at P < 0.11)

[0600] Discussion: SUC2::G481 lines were obtained using both a direct-promoter fusion and a two-component approach. In either case, most of the lines were rather dark green in coloration, and showed delayed flowering. It is noteworthy that these effects were potentially stronger than those seen in 35S::G481 lines, indicating that high levels of G481 protein in the vascular system heavily influenced those phenotypes.

[0601] Potential applications. From our earlier studies, it was concluded that G481 could be applied to improve abiotic stress tolerance. These experiments indicate that SUC2 (or another vascular specific promoter) can be useful for optimizing G481 activity. Nonetheless, since the delayed flowering phenotype was potentially more severe than that observed with the 35S promoter, in certain target species such as soybean, the SUC2::G481 combination might actually exacerbate any off-types associated with delayed flowering and maturation.

[0602] Aside from abiotic stress tolerance traits, the SUC2::G481 combination may be of use in modifying flowering time. The dark coloration of SUC2::G481 lines might also be indicative of higher levels of chlorophyll or other pigments which could enhance photosynthetic capacity and yield.

G481 (SEQ ID NO: 1 and 2; Arabidopsis thaliana)—RNAi (GS)

[0603] Background. The aim of this project was to determine if G481 plays a critical role in stress tolerance by using an RNAi approach that was designed to specifically target G481 but not its related clade members.

[0604] Morphological Observations. Overall, lines harboring a G481 RNAi(GS) construct exhibited no consistent differences in morphology to wild-type controls.

[0605] A minority of T1 plants were noted to exhibit slight alterations in flowering time. A few lines were somewhat late flowering whereas a few others were marginally early flowering. Six populations were examined in the T2 generation: four lines appeared wild type.

[0606] Physiology (Plate assays) Results. Lines harboring a G481 RNAi (GS) construct were more tolerant to cold conditions in germination and growth assays.

[0607] Physiology (Soil Drought—Clay Pot) Summary. Three independent lines were tested in soil drought assays. The results indicate that the G481-RNAi (GS) construct might confer some level of drought tolerance.

[0608] One of the lines (#1672) showed significantly better survival that controls in two independent plantings. The other two lines each showed better survival on one plant date but not on a second plant date.

TABLE 36
G481-RNAi (GS) drought assay results:

| | | Mean | | p-value for | Mean | Mean | p-value for |
|---|---|---|---|---|---|---|---|
| | Project | drought | Mean drought | drought score | survival for | survival for | difference in |
| Line | Type | score line | score control | difference | line | control | survival |
| 1668 | RNAi (GS) | 1.8 | 0.74 | 0.080* | 0.36 | 0.19 | 0.0013* |
| 1668 | RNAi (GS) | 0 | 0.11 | 0.50 | 0 | 0.016 | 0.99 |
| 1669 | RNAi (GS) | 1.5 | 0.74 | 0.17 | 0.19 | 0.19 | 0.96 |
| 1669 | RNAi (GS) | 0.67 | 0.11 | 0.27 | 0.083 | 0.016 | 0.034* |
| 1672 | RNAi (GS) | 2.0 | 0.74 | 0.32 | 0.38 | 0.19 | 0.00028* |
| 1672 | RNAi (GS) | 0.67 | 0.11 | 0.31 | 0.095 | 0.016 | 0.020* |

Survival = proportion of plants in each pot that survived
Drought scale: 6 (highest score) = no stress symptoms, 0 (lowest score; most severe effect) = extreme stress symptoms
*line performed better than control (significant at P < 0.11)

[0609] Discussion. Forty lines containing the G481 RNAi(GS) construct were studied, and overall, these lines appeared morphologically wild type. Nonetheless, minor changes in flowering time were noted in a minority of the lines, with some appearing slightly early flowering and others being slightly late flowering. These effects were subtle.

[0610] Surprisingly, G481 RNAi(GS) lines showed tolerance to cold in both germination and seedling growth assays. Additionally, evidence of drought tolerance was also obtained for G481 RNAi(GS) in soil based assays. It is interesting to compare these results with those obtained for a KO.G481 T-DNA allele: KO.G481 plants did not show an enhanced performance in plate assays, and in fact showed increased sensitivity to NaCl. No consistent difference to controls was seen for KO.G481 lines in soil drought assays, but the KO lines did show accelerated flowering.

[0611] The differences in phenotypes obtained with the G481 RNAi(GS) lines versus the KO.G481 alleles demonstrates that the RNAi(GS) construct either did not produce a complete knock-down of G481 activity, or influenced other components of the NF-Y family in a manner that had not been predicted. Thus, to determine the basis of the stress tolerance seen in these lines, substantial follow-up studies would be needed to assess the effects on other genes within the family. Nonetheless, the results confirm that the effects on stress tolerance seen with the NF-Y family are complex and are likely the result of genetic interactions between different members of the family. We have now performed a preliminary analysis on these RNAi(GS) lines to examine the effects on expression of a selected set of CCAAT family genes; we have found that there appeared to be a down-regulation of the HAP2 gene, G926 (which produces stress tolerance when knocked-out). Thus, the stress tolerance seen in the G481 RNAi(GS) lines may be an indirect result of down-regulation of G926.

[0612] Potential applications. These results indicate that enhanced stress tolerance can be obtained via knock-down approaches on the NF-Y family as well as by overexpression of genes encoding particular subunits. G481 RNAi (GS) lines may represent an indirect approach to reducing expression of G926, with reduced expression of G926 conditioning enhanced stress tolerance.

G481 (SEQ ID NO: 1 and 2; Arabidopsis thaliana)—Deletion Variant

[0613] Background. The aim of this project was to further refine our understanding of G481 function by use of a “dominant negative” approach in which truncated versions of the protein were overexpressed. Two different constructs (P21273 and P21274) were used to overexpress different portions of the G481 B domain (see sequence section for details).

[0614] Morphological Observations. Lines have been obtained for each of two different G481 deletion variant constructs (P21273 and P21274), each of which overexpresses a fragment of the G481 protein.

[0615] P21274 lines: some of these lines showed alterations in leaf shape, coloration, and, generally, delayed flowering time. However, such effects were of moderately low penetrance and were variable between lines and plant dates, suggesting that they could have been influenced by subtle changes in growth conditions. Many of the lines appeared wild type.

[0616] P21273 lines: Plants harboring this construct exhibited wild-type morphology at all stages of development.

[0617] Physiology (Soil Drought-Clay Pot) Summary. Overexpression lines for P21274, containing a truncated variant of G481 (see sequence section for details), exhibited enhanced drought tolerance in soil based assays.

[0618] Four independent lines were examined. Lines 1270 and 1267 yielded consistent results; both showed more tolerance than controls in each of the two whole pot experiments in they were tested. These lines, however, showed a wild-type performance in a single run of a split pot assay. Another line, 1266, showed significantly better survival in a split pot experiment and one run of a whole pot assay. However, in a different run of a whole pot assay, that line showed a worse performance than controls. The fourth line, 1269, showed a comparable performance to controls in both a whole pot and a split pot experiment.

TABLE 37
G481 deletion variant drought assay results:

| | | Mean | Mean | p-value for | Mean | Mean | |
|---|---|---|---|---|---|---|---|
| | Project | drought | drought | drought score | survival | survival for | p-value for difference |
| Line | Type | score line | score | difference | for line | control | in survival |
| 1267 | DV | 3.7 | 1.6 | 0.081* | 0.43 | 0.23 | 0.0010* |
| 1267 | DV | 1.5 | 0.70 | 0.10* | 0.18 | 0.12 | 0.18 |
| 1267 | DV | 2.3 | 1.8 | 0.35 | 0.32 | 0.25 | 0.41 |
| 1270 | DV | 5.3 | 1.6 | 0.0045* | 0.67 | 0.23 | 0.000000000034* |
| 1270 | DV | 4.0 | 0.70 | 0.000065* | 0.49 | 0.12 | 0.00000000000046* |
| 1270 | DV | 1.2 | 1.1 | 0.82 | 0.17 | 0.15 | 0.82 |

DV = Deletion variant; transcription factor dominant negative deletion, secondary domain (this truncated versions of G481 was overexpressed to drought tolerance conferred by particular parts of the protein. Such an approach can result in dominant negative alleles.)
Survival = proportion of plants in each pot that survived
Drought scale: 6 (highest score) = no stress symptoms, 0 (lowest score; most severe effect) = extreme stress symptoms
*line performed better than control (significant at P < 0.11)

[0619] Discussion. Transgenic Arabidopsis lines were created for each of the deletion variant constructs. Plants containing P21273 (which overexpressed an N-terminal portion of the B domain: amino acids 21-84) were morphologically similar to wild-type at all stages of development. When tested in plate based assays, these lines showed a wild-type response and were not tested in soil drought experiments.

[0620] Interesting phenotypes, however, were obtained for lines harboring the second construct (P21274) which overexpressed an N-terminal portion of the B domain: amino acids 51-117. This fragment of the G481 protein was predicted to be incapable of DNA binding, but could potentially have associated with other HAP subunits. The P21274 lines showed tolerance to NaCl in germination assays and exhibited drought tolerance in soil based assays. Developmental changes were also noted in some of the lines. Among the primary transformants, a delay in the onset of flowering, along with long, narrow, slightly dark leaves was observed in about one third of the lines. A number of T2 populations were morphologically examined; changes in leaf shape were apparent, and some lines showed slightly delayed flowering. However, in other T2 lines, a slight acceleration in flowering was noted. Thus, the effects on flowering time were somewhat unstable, and could have depended on the specific level of overexpression, along with environmental factors such as light intensity and temperature.

[0621] In soil drought physiology experiments performed on P21274 lines, apparently higher levels of chlorophyll and carotenoids compared to wild-type were observed at a moderately droughted state. One of the lines (#1270, which showed the strongest drought tolerance phenotype) also showed a higher level of proline versus wild-type under a well-watered condition and under a mild drought. A slightly elevated ABA level was also apparent in this line under mild drought.

[0622] It should be noted that late flowering and stress tolerance have been observed in plants overexpressing the full-length version of G481 and in a KO.G485 line. Thus, the phenotypes seen in the deletion variant lines could have been due to interference of the truncated form of G481 with other components of the CCAAT-binding complex. The results also raise the possibility that stress tolerance produced by overexpression of the native full-length version of G481 might be derived from a similar “dominant negative” type effect.

[0623] Potential applications. Based on the results of our overexpression studies, G481 and its related paralogs are excellent candidates for improvement of drought related stress tolerance in commercial species. This deletion variant study adds further insight into how G481 might influence stress tolerance. It is possible that the truncated form of G481 confers more robust stress tolerance than the native full-length form. The results from this study indicate that both stress tolerance and flowering time traits can be obtained from overexpression of a fragment of a CAAT binding factor, and are not dependent on the full-length protein being overexpressed.

G481 (SEQ ID NO: 1 and 2; Arabidopsis thaliana)—Super Activation (C-GAL4-TA)

[0624] Background. The aim of this project was to determine whether the efficacy of the G481 protein could be improved by addition of an artificial GAL4 activation domain at the C-terminus.

[0625] Morphological Observations. Overexpression of a G481-GAL4 fusion, produced a striking acceleration in the onset of flowering (1-2 weeks under 24-hour light conditions) and a severe reduction in overall plant size.

[0626] T1 lines:

[0627] The above effect was highly penetrant and was observed in the majority of plants from three separate batches of T1 lines.

[0628] T2 lines:

[0629] Accelerated flowering was also observed, to varying extents in the T2 generation populations.

[0630] Physiology (Plate assays) Results. Fifteen different 35S::G481-GAL4 lines were tested in plate based assays, spanning two different plant dates. Positive results were obtained in a number of different assays as shown in the table below. For unknown reasons, though, lines from the 521-531 set showed a lower frequency of phenotypes than those from the 1621-1640 set.

[0631] Substantially enhanced tolerance, relative to controls, was seen NaCl germination (5/15 lines) and heat germination (5/15 lines).

[0632] A number of the lines which showed a strong performance in these assays also performed better than wild-type in other assays such as severe dehydration and chilling growth. Additionally, a number of lines were generally larger and more vigorous than wild-type controls on regular control growth and germination MS plates.

[0633] Discussion. Several independent transgenic lines were generated for this study. The majority of these plants displayed a striking acceleration in the onset of flowering, as well as a severe reduction in overall plant size. Interestingly, the flowering results seen here were largely opposite to the late flowering seen from overexpression of the wild-type form of the G481 protein (see 35S::G481 report). It should be emphasized that the effects on flowering time obtained with 35S::G481-GAL4 were most comparable to those seen in 35S::G482 or 35S::G485 lines. Thus, the new domain added at the C-terminus had switched the effects on flowering produced overexpression of the native G481 protein.

[0634] Lines tested in soil drought assays gave rather inconclusive results. Two independent lines showed significantly better survival than controls in one of the runs of the assay. Nonetheless, other lines actually performed worse than wild type in later runs of the assay. Interestingly, though, the lines which showed this poor performance were the ones that exhibited the strongest effects on flowering time; thus, there might exist a threshold level of G481-GAL4 activity, above which the effects become negative.

[0635] Potential applications. Based on the results of our overexpression studies, the G481-GAL4 combination could be used to modify flowering time. Nonetheless, it might be necessary to select plants with an optimum level of G481-GAL4 expression in order to achieve both early flowering and drought tolerance. In the light of the delayed maturation off-type seen in 35S::G481 soy lines, the G481-GAL4 combination may be used in that species to achieve drought tolerance without a delay in maturity.

G481 (SEQ ID NO: 1 and 2; Arabidopsis thaliana)—RNAi (Clade)

[0636] Background. The aim of this project was to determine if the G482 clade plays a critical role in stress tolerance by using an RNAi approach that was designed to specifically target the G482 clade members (G481, G482, G485, G1364 and G2345).

[0637] Morphological Observations. G481-RNAi (clade) lines exhibited complex changes in flowering time and leaf shape/coloration.

[0638] Three independent batches containing a total of 43 T1 lines harboring G481 RNAi (clade) constructs were examined. Plants from each of these three sets of lines exhibited a clear delay in the onset of flowering (up to 2-3 weeks later than wild-type under 24 hour light conditions) and displayed leaves that were long, narrow and slightly dark in coloration. Several lines were tiny and darker green at early stages. A number of lines showed very long petioles.

[0639] Physiology (Plate assays) Results. G481-RNAi (clade) lines were more tolerant than control plants to salt (5 of 24 lines tested), mannitol (3 of 24 lines), sucrose (3 of 24 lines), growth in heat (9 of 24 lines), severe desiccation (3 of 24 lines), and growth in cold (5 of 24 lines). One line (#1322) was much more tolerant to heat than wild-type controls during germination in duplicate plate assays conducted.

[0640] Discussion. Two different sets of RNAi molecules were designed to interfere with the expression of the G482 clade. One variant (P21305) was based on sequences from G485 and G2345, while the other variant (constructs P21159 and P21300, which were identical to each other) was modeled on G482 and G2345. Both variants contained base-pair mutations intended to optimize homology to the clade.

[0641] Each of the RNAi (clade) constructs produced similar, but complex effects on plant development. In the T1 generation, many of the lines for each construct exhibited a clear delay in the onset of flowering (up to 2-3 weeks later than wild-type under 24 hour light conditions) and displayed leaves that were long, narrow and slightly dark in coloration. However, a number of lines were later examined in the T2 generation. In some cases, the plants showed a comparable phenotype to that seen in the T1 and were late flowering. However, unexpectedly, some of the T2 populations were early flowering, even though the parental plant had been late flowering. Additionally, for a given T2 line, in some instances a flowering time phenotype was apparent in one planting, but was not seen on a different plant date. Thus, the effects of the transgene appeared to change between generations, and could have depended on subtle variables such as temperature and light intensity, which might have differed between plantings.

[0642] When tested in plate-based physiology assays, lines for each of the constructs showed evidence of stress tolerance. In particular, lines of both constructs displayed enhanced tolerance in a heat growth assay. Lines for one of the constructs (P21305) also showed consistently better tolerance than controls to a mannitol germination assay. Many of the lines also were larger and more vigorous than wild-type seedlings when grown on control plates in the absence of a stress treatment.

[0643] Potential applications. These results indicate that enhanced stress tolerance can be obtained via knock-down approaches on the NF-Y family as well as by overexpression of genes encoding particular subunits.

[0644] The morphological effects seen in these RNAi lines indicate that a knock-down approach could also be applied to the NF-Y family to modify flowering time. Also the dark coloration seen in the lines could indicate an increase in chlorophyll levels; thus the gene may be used to improve photosynthetic capacity, yield, and nutritional quality.

G481 (SEQ ID NO: 1 and 2; Arabidopsis thaliana)—Knockout (KO)

[0645] Background. The aim of this project was to determine if G481 plays a critical role in stress tolerance by knocking out its expression using T-DNA insertional mutagenesis. A null mutant for G481 would also assist with genetic analysis (for example, via its combination with other KO and overexpressing lines) to allow a more refined understanding of where the gene is positioned in stress tolerance pathways relative to other genes.

[0646] Insertion line SALK_{—}032272 (NCBI acc. no. BH612182, version BH612182.1; GI:1805975; SALK_{—}032272 Arabidopsis thaliana TDNA insertion lines Arabidopsis thaliana genomic clone SALK_{—}032272, genomic survey sequence): BLAST analysis of the sequence from the insertion point deposited in GenBank by SALK indicates that the T-DNA in this line is integrated approximately 1300 bp downstream of the G481 start codon.

[0647] Insertion line SALK-109993 (NCBI acc. no. BZ664699; version BZ664699.1; GI:28181591; SALK-109993.42.55.x Arabidopsis thaliana TDNA insertion lines Arabidopsis thaliana genomic clone SALK_{—}109993.42.55.x, genomic survey sequence): BLAST analysis of the sequence from the insertion point deposited in GenBank by SALK indicates that the T-DNA in this line is integrated approximately 115 bp downstream of the G481 start codon.

[0648] RT-PCR and protein blot experiments performed on tissue from the homozygous plants did not detect G481 transcript or protein compared to wild-type controls. Thus, both of the T-DNA insertion alleles appear to be null mutations.

[0649] Morphological Observations. We have isolated homozygous KO.G481 populations for two independent T-DNA insertion alleles derived from the SALK collection. In each case, the plants showed accelerated flowering, but this phenotype varied in penetrance across different plant dates, and was likely influenced by subtle differences in growth conditions.

[0650] Physiology (Plate assays) Results. Homozygotes for a T-DNA insertion within G481 (SALK-032272) were more sensitive to sodium chloride in a germination assay.

[0651] Discussion. We have isolated homozygous KO.G481 populations for two independent T-DNA insertion alleles derived from the SALK collection. Both of these appear to be null mutations, based on the absence of G481 transcript or protein. In each case, the plants showed accelerated flowering, but this phenotype varied in penetrance across different plant dates, and was likely influenced by subtle differences in growth conditions.

[0652] One of the alleles was tested in plate-based physiological assays, the plants were more sensitive to sodium chloride germination, having lower germination efficiency than wild-type plants. This result was reproduced in a number of repeats of the experiment. This finding supports the notion that G481 has an endogenous role in abiotic stress protection. As yet, though, we have not found a clear-cut difference between the KO lines and wild-type in soil based drought assays.

[0653] Potential applications. The results of this study complement the findings of our overexpression experiments and indicate that G481 has an endogenous role in affording stress tolerance in Arabidopsis. This supports our earlier conclusions that the gene may be applied to engineer improved drought and abiotic stress tolerance in commercial crops. The accelerated flowering seen in the KO lines indicates that G481 might act as a floral repressor as part of its native role, and that the gene may be applied to modify flowering time traits.

G485 (SEQ ID NO: 17 and 18; Arabidopsis thaliana)—Constitutive 35S

[0654] Background. G485 is a non-LEC1-like member of the HAP3 (NF-YB) sub-group of the Arabidopsis CCAAT-box binding transcription factor family. Along with G482, this gene occupies a separate sub-clade within the phylogeny to G481. G485 has been referenced as sequence 1042 from patent application WO0216655 on stress-regulated genes, transgenic plants and methods of use. G485 was reported therein to be cold responsive in a microarray analysis (Harper et al., 2002). The gene has also been designated as NF-YB3 by Gusmaroli et al. (2001; 2002).

[0655] During the earlier genomics program, we examined knockout and overexpression lines for G485. While no effects were noted at that time for drought stress related phenotypes, effects on flowering time were observed for plants overexpressing G485. These plants had accelerated flowering, bolting up to one week earlier than wild-type plants grown under 24 hr lights. These studies, combined with studies on plants lacking G485 expression (see the KO.G485 report) demonstrate that G485 is sufficient to act as a floral activator, and is also necessary in that role within the plant.

[0656] The aim of this study was to re-assess the effects of overexpression of G485 using a two-component system and to determine if this gene can confer enhanced stress tolerance in a manner comparable to G481.

[0657] Morphological Observations. Many of the 35S::G485 two-component lines exhibited a marked acceleration in the onset of flowering and generally formed flower buds 1-2 weeks sooner than wild type under continuous light conditions. Many of the lines also showed a reduction in rosette biomass compared to wild type. In fact, three of twenty lines showed a severe dwarf phenotype and did not survive to maturity. Early flowering was exhibited by 11/20 of the T1 lines (#301, 302, 303, 304, 306, 307, 309, 313, 315, 317, and 319). The remaining lines appeared wild type, apart from lines 310 and 314 which were noted to be slightly delayed in the onset of flowering. Line 14 was also infertile and failed to yield seed.

[0658] Flowering time was also assessed in a number of T2 populations: plants from the T2-302, T2-305, T2-307, T2-309, and T2-319 all displayed early flowering comparable to that seen in the parental lines. Plants from the T2-310 and T2-311 populations flowered at the same time as controls.

[0659] (All of the ten 2-component lines submitted for physiological assays showed segregation on selection plates in the T2 generation that was compatible with the transgene being present at a single locus.)

[0660] A new set of 35S::G485 direct promoter-fusion lines (361-380) was subsequently obtained; 19/20 of the T1 plants were noted to be early flowering, slightly small and slightly pale in coloration. One of the lines (T2-369) was grown in the T2 generation and showed early flowering. A pair of lines obtained during the initial genomics program (lines 76 and 77) were also examined; line 77 flowered early, whereas line 76 appeared wild type.

[0661] Physiology (Plate assays) Results. We had previously observed that G485 overexpressing lines behaved similarly to the wild-type controls in all physiological assays performed. However, when seedlings from ten new two-component lines overexpressing G485 were examined, tolerance to several stress related conditions were observed. Eight of ten lines were more tolerant to salt stress in a germination assay compared to wild-type seedlings. Several salt tolerant lines were also less sensitive to sucrose, ABA, and cold stress in separate germination assays.

[0662] In subsequent experiments, a new set of ten 35S::G485 direct fusion lines were tested. These lines were more tolerant than controls in a cold growth assay, but appeared wild type in the other assays. The differences in results seen between one and two-component lines could be attributed to different ranges of G485 overexpression levels being attained via these approaches.

[0663] Physiology (Soil Drought-Clay Pot) Summary. 35S::G485 (2-component) overexpression lines showed evidence of drought tolerance when tested in soil based assays. Three independent lines were tested in a whole pot assay; two of these lines (lines 310 and 319) showed better tolerance and/or recovery than wild-type on at least one of three different plant dates. Line 310 also performed better than wild-type in a single run of a split pot soil drought assay (line and controls together in same pot). A third (2-component) line (#311) performed better than wild-type in two runs of the assay, but for unknown reasons, performed worse than wild-type when the assay was repeated for a third time. Such variation in results between different plantings suggests that the drought resistance phenotype could have been influenced by factors such as growth temperature, air-flow, and light intensity, which might have varied between different runs of the experiment.

[0664] Four independent 35S::G485 direct promoter-fusion lines were also put through soil assays, but these showed no consistent improvement in drought tolerance relative to wild type. In fact, two of the direct promoter-fusion lines performed worse than wild-type on one of the dates tested.

[0665] The differences in performance observed between 2-component and direct fusion lines for G485 suggest that there might be a particular range of G485 levels which are effective under drought conditions.

TABLE 38
35S::G485 drought assay results:

| | | | | p-value for | | | p-value for |
|---|---|---|---|---|---|---|---|
| | Project | Mean drought | Mean drought | drought score | Mean survival | Mean survival | difference in |
| Line | Type | score line | score control | difference | for line | for control | survival |
| 310 | TCST | 0.83 | 0.50 | 0.43 | 0.13 | 0.095 | 0.47 |
| 310 | TCST | 1.5 | 0.90 | 0.24 | 0.23 | 0.14 | 0.067* |
| 310 | TCST | 0.30 | 0.10 | 0.30 | 0.014 | 0.043 | 0.17 |
| 310 | TCST | 3.6 | 2.3 | 0.045* | 0.51 | 0.33 | 0.045* |
| 319 | TCST | 1.4 | 0.10 | 0.00056* | 0.21 | 0.036 | 0.000096* |
| 319 | TCST | 1.3 | 0.50 | 0.024* | 0.14 | 0.11 | 0.47 |

TCST = two-components-supertransformation project
Survival = proportion of plants in each pot that survived
Drought scale: 6 (highest score) = no stress symptoms, 0 (lowest score; most severe effect) = extreme stress symptoms
*line performed better than control (significant at P < 0.11)

[0666] Discussion. As was seen for the direct 35S promoter fusion lines generated for our earlier genomics program, plants expressing 35S::G485 via the two-component system consistently flowered 1-2 weeks earlier than wild-type plants under 24 hr light. (Similar effects on flowering time were noted with other G481-related genes such as G482 and G1820.)

[0667] Evidence of drought tolerance was seen in the 2-component lines but was not apparent in the direct fusion lines. There was no clear-cut association between drought tolerance and flowering time, since drought tolerance was obtained in a line that was early flowering and in a line that was wild type.

[0668] 35S::G485 lines (both the direct fusion lines and the two-component lines) were also examined in “single pot” soil drought experiments and a number of physiological parameters were measured. No consistent differences to controls were seen.

[0669] The difference in results between the two-component and direct fusion approached might be accounted for by the two-component system giving an amplification of G485 overexpression relative to that found in 35S::G485 direct fusion lines.

[0670] Potential applications. The results of this study bolster our conclusion that G481 and the related genes such as G485 are excellent candidates for improvement of abiotic stress tolerance (such as drought, cold, and salt) in commercial species.

[0671] Additionally, G485 could be used to manipulate flowering time, and may be particularly useful in situations where an acceleration or induction of flowering was desired.

G485 (SEQ ID NO: 17 and 18; Arabidopsis thaliana)—KO

[0672] Background. We d previously examined KO and overexpression lines for G485. While no effects were noted at that time for drought stress related phenotypes, effects on flowering time were observed for plants overexpressing G485. These plants had accelerated flowering, bolting up to 1 week earlier than wild-type plants grown under 24 hr lights. The knock out line appeared wild type, but we subsequently reported preliminary data for a SALK line (SALK_{—}062245

[0673] (NCBI acc. no. BH791968, version BH791968.1; GI: 19887127; SALK_{—}062245.42.85.x Arabidopsis thaliana TDNA insertion lines Arabidopsis thaliana genomic clone SALK_{—}062245.42.85.x, genomic survey sequence). that showed delayed flowering. These studies indicated that G485 is both sufficient to act as a floral activator, and is also necessary in that role within the plant. The aim of this study was to use a KO approach to determine whether G485 has a native role in stress response pathways.

[0674] A G485 T-DNA insertion line derived the SALK collection (SALK_{—}062245) was obtained from the ABRC at Ohio State University. BLAST analysis of the sequence from the insertion point deposited in GenBank by SALK indicates that the T-DNA in this line is integrated near the end of the gene, approximately 458 bp downstream of the G485 start codon.

[0675] Morphological Observations. We identified two homozygous plants (lines 341, 346), by PCR genotyping, among seven individual plants germinated from the seed lot supplied by the ABRC. Both of these homozygotes were later flowering compared to controls (24-hour light conditions).

[0676] Selfed seed was collected from lines 341 and 346 and a batch of 18 progeny from each was grown, verified as being homozygous, and morphologically examined under 24-hour light conditions. Both these batches of plants again showed a moderate delay in flowering (approximately 1-2 weeks after controls). Seeds were collected from the 18 plants from homozygous line 341 and the next generation were examined on multiple independent plant dates. In each of these plantings, a delay in the onset of flowering was observed, and in some cases the plants took on a dark coloration.

[0677] RT-PCR experiments performed on tissue from the homozygous plants initially did not detect G485 transcript compared to wild-type controls, suggesting that the T-DNA insertion had resulted in a null mutation. However, in later experiments we detected a (weak) larger band, using primers spanning the putative T-DNA insertion site. Our interpretation is that this allele comprises a T-DNA border inserted into the 3′ end of the G485 gene. Currently, it is not known whether the allele is functional.

[0678] Physiology (Plate assays) Results. Homozygotes for a T-DNA insertion within G485 (SALK_{—}062245) were more tolerant than wild-type seedlings in germination assays containing sodium chloride and ABA. Such results were obtained with seed lots derived from multiple different homozygous plants carrying the SALK_{—}062245 insertion.

[0679] Physiology (Soil Drought-Clay Pot) Summary. Homozygotes for a T-DNA insertion within G485 (SALK-062245) showed enhanced drought tolerance in soil based assays.

### G485 Knockout

[0680] G485 plants were tested on three independent plant dates; more tolerance to and better recovery from drought than controls was obtained on two of those three dates. On the third date, the plants showed a wild-type performance.

TABLE 39
G485 Knockout drought assay results:

| | | Mean | Mean | p-value for | Mean | Mean | p-value for |
|---|---|---|---|---|---|---|---|
| | Project | drought | drought | drought score | survival for | survival for | difference in |
| Line | Type | score line | score control | difference | line | control | survival |
| 341-1 | KO | 1.7 | 0.73 | 0.019* | 0.23 | 0.13 | 0.00084* |
| 341_MIX | KO | 2.4 | 1.3 | 0.10* | 0.41 | 0.26 | 0.0081 |
| 341_MIX | KO | 1.6 | 1.4 | 0.59 | 0.43 | 0.43 | 1.0* |

KO = knockout
Survival = proportion of plants in each pot that survived
Drought scale: 6 (highest score) = no stress symptoms, 0 (lowest score; most severe effect) = extreme stress symptoms
*line performed better than control (significant at P < 0.11)

[0681] Discussion. Homozygotes for a G485 T-DNA insertion line (SALK_{—}062245, which carried the T-DNA at the 3′ end of the gene) were confirmed to be late flowering, and showed a 1-2 week delay in flowering under 24-hour light conditions. Additionally, following the onset of flowering, in some of the plantings, the plants were somewhat dark in coloration relative to wild type. In plate based assays, this KO line exhibited greater tolerance than controls in separate ABA and NaCl germination assays. The KO.G485 line also showed a better performance than controls in soil drought assays. At present, it is not clear whether the allele used in these experiments was null or retained some degree of activity. Our RT-PCR experiments indicate that the allele comprises a T-DNA border inserted into the end of the G485 gene. An expressed product, which is larger than the native transcript, is detectable.

[0682] Results for the KO.G485 line are very comparable to the data obtained for G481 overexpression lines. Thus, there could be antagonistic interactions between different genes from the NF-Y family. The physiological basis of the stress tolerance in this KO line is therefore not yet clear and might be related either to parameters that were not measured in the physiology experiments or to changes that were too subtle to detect.

[0683] Potential applications. The data from these KO studies confirm that G485 is part of the genetic networks that regulate flowering time, and as such, the gene may be used to manipulate the onset of flowering in commercial species. The data from our plate and soil drought assays, also demonstrate that G485 regulates stress tolerance; confirming that the gene is a good candidate for the modification of stress tolerance traits. In particular, the results indicate that it might be possible to modify abiotic stress tolerance and flowering time by knock-down approaches, such as by screening for (naturally) occurring alleles of G485 orthologs in target crop species. Technology such as TILLING (McCallum, C., et al., 2000) could be used as part of such approaches.

G482 (SEQ ID NO: 27 and 28; Arabidopsis thaliana)—Constitutive 35S

[0684] Background. G482 is a non-LEC1-like member of the HAP3 (NF-YB) sub-group of the Arabidopsis CCAAT-box binding transcription factor family. Along with G485, this gene occupies a separate sub-clade within the phylogeny to G481. G482 has been referenced in the public literature as AtHAP3b and AF-YB2 (Edwards et al., 1998; Gusmaroli et al., 2001; 2002). Data in these papers suggest that the gene is constitutively expressed.

[0685] We have previously observed that plants overexpressing G482 were NaCl tolerant in a germination assay. The aim of this study was to re-assess the effects of overexpression of G482 (using a two-component system) and to compare these to the effects of changes in G481 activity.

[0686] Morphological Observations. We have now generated 35S lines for G482 using the two-component system; two batches of T1 lines (321-341 and 341-360) were examined and many of the plants showed a striking acceleration of flowering (1-2 weeks sooner than wild-type) under 24 hour light conditions.

[0687] The early flowering effect was seen in many of the lines examined. The majority of 35S::G482 lines also displayed a slight reduction in overall size; in fact a number of lines were very small and did not survive to maturity. Comparable effects on flowering time were also seen in five of six T2 populations. Plants from a sixth T2 population (T2-346) were slightly small and slow growing, but otherwise appeared wild type.

[0688] All of the ten 2-component lines submitted for physiological assays showed segregation on selection plates in the T2 generation that was compatible with the transgene being present at a single locus.

[0689] We isolated a new batch of 35S::G482 direct promoter fusion lines. In contrast to the two component lines, early flowering was observed at relatively low frequency and was apparent in only 3/20 of the lines.

[0690] The basis for the difference in result between the direct fusion and two-component lines is unknown. However, it could relate to the possibility that higher levels of G482 activity were obtained with a two-component approach.

[0691] Physiology (Plate assays) Results. During our earlier genomics program, plants overexpressing G482 showed increased seedling growth relative to wild-type when germinated on high salt media. A similar tolerance to osmotic stress was observed in the present studies.

[0692] Initially, two-component lines were tested in these plate assays. Five out of ten lines had better seedling vigor versus controls when germinated on plates containing mannitol. Three of these lines also had more vigor in a heat germination assay compared to wild-type seedlings.

[0693] Subsequently, we tested a new set of direct promoter-fusion lines. These lines showed a lower frequency of phenotypes than the two component lines, and positive results were not seen in the mannitol and heat assays. Nonetheless, two of the lines did show an enhanced tolerance in the NaCl germination assay, confirming our initial result from the genomics program.

[0694] Physiology (Soil Drought-Clay Pot) Summary. Overexpression of G482 conferred enhanced drought tolerance under soil grown conditions.

[0695] Positive results were obtained in the “whole pot” assay. Three independent two component lines were each tested in four different plantings. Two of the lines showed a significantly enhanced performance across multiple plantings (#351 on two of four dates and #354 on three of four dates).

TABLE 40
35S::G482 drought assay results:

| | | Mean | Mean | p-value for | Mean | Mean | p-value for |
|---|---|---|---|---|---|---|---|
| | Project | drought | drought | drought score | survival for | survival for | difference in |
| Line | Type | score line | score control | difference | line | control | survival |
| 351 | TCST | 1.0 | 0.37 | 0.12 | 0.11 | 0.063 | 0.17 |
| 351 | TCST | 1.0 | 1.0 | 1.0 | 0.13 | 0.13 | 0.93 |
| 351 | TCST | 1.9 | 0.70 | 0.074* | 0.39 | 0.18 | 0.00016* |
| 351 | TCST | 2.4 | 0.40 | 0.00021* | 0.44 | 0.036 | 0.00000000028* |
| 354 | TCST | 2.0 | 0.37 | 0.0015* | 0.19 | 0.063 | 0.00068* |
| 354 | TCST | 1.0 | 1.0 | 1.0 | 0.15 | 0.13 | 0.57 |
| 354 | TCST | 1.7 | 1.0 | 0.14 | 0.54 | 0.37 | 0.0042* |
| 354 | TCST | 1.9 | 0.90 | 0.041* | 0.31 | 0.11 | 0.000071* |

TCST = two-components-supertransformation project
Survival = proportion of plants in each pot that survived
Drought scale: 6 (highest score) = no stress symptoms, 0 (lowest score; most severe effect) = extreme stress symptoms
*line performed better than control (significant at P < 0.11)

[0696] Discussion. G482 (two-component) overexpression lines showed a striking 1-2 week acceleration in flowering time. Additionally, many of the lines showed a slight overall decrease in size, and some lines did not survive to maturity. Similar effects on flowering time were noted with other G481-related genes such as G485 and G1820.

[0697] The effects on flowering time were not originally noted in our earlier genomics screen when 35S::G482 direct fusion lines were examined. To re-assess that result, we isolated a new set of direct fusion lines; the majority of plants flowered at a similar time to controls, and early flowering was seen in only a small number (3/20) of the lines. The new set of direct fusion lines was also tested in plate based assays. Positive phenotypes were obtained at a lower frequency than with the two-component lines; two of ten 35S::G482 direct fusion lines showed salt tolerance in a germination assay, out in most of the assays, a wild-type response was observed. The direct fusion lines were not tested in soil based assays.

[0698] It is possible that the higher penetrance of flowering time and stress resistance phenotypes obtained in the two-component lines versus direct fusion lines resulted from higher levels of G482 overexpression in the former.

[0699] Potential applications. The results of this study strengthen our conclusion that G481 and its related genes are excellent candidates for improvement of drought related stress tolerance in commercial species. Additionally, G482 could be useful for manipulating flowering time.

G482 (SEQ ID NO: 27 and 28; Arabidopsis thaliana)—Vascular SUC2

[0700] Background. G482 is a close Arabidopsis homolog of G481. The aim of this project was to determine whether expression of G482 from a SUC2 promoter, which drives expression in a vascular specific pattern, would produce comparable effects on morphology and stress tolerance to that seen with a 35S promoter.

[0701] Morphological Observations. Lines in which G482 was expressed from the SUC2 promoter have now been obtained using the 2-component system. These lines showed a very marked acceleration in the onset of flowering under 24-hrs light, were slightly pale in coloration, and were generally more developmentally advanced than controls at all developmental stages.

[0702] A few lines were slightly small at early stages. At later stages most lines were early developing and had lighter green rosettes than controls.

[0703] Physiology Results. In plate experiments, except for occasional SUC2::G482 lines which showed positive results in cold and dehydration assays, no consistent difference was observed compared to controls.

[0704] Discussion. SUC2::G482 lines have been generated using a two component system. These lines were very similar to 35S lines and showed a very clear-cut acceleration of flowering. However, the phenotype was obtained at an even higher penetrance in the SUC2::G482 lines than in the 35S::G482 lines. Thus, high levels of G482 protein in the vascular system appear to be sufficient to effect this flowering phenotype (the result is also interesting in the light of our finding that SUC2::G481 lines showed similar phenotypes to 35S::G481 lines).

[0705] Potential applications. Given the effect on flowering time, the SUC2::G482 combination may be useful for modifying the onset of flowering, particularly in instances where an acceleration or induction of flowering is desired.

G489 (SEQ ID NO: 45 and 46; Arabidopsis thaliana)—Constitutive 35S

[0706] Background. G489 is a member of the HAP5 (NF-YC) subfamily of the CCAAT-box binding transcription factors. Since the NF-Y factors are known to act as trimeric complexes (comprising YA, YB, and YC subunits) we are testing whether genes for the other subunits (YCs and YAs) can confer drought tolerance in a comparable manner to genes encoding the YB subunit class to which G481 belongs.

[0707] We initially had observed that plants overexpressing G489 were tolerant of NaCl and mannitol in separate growth assays. Morphologically, the plants were similar to wild type. The aim of this study was to re-assess 35S::G489 lines for drought-related stress tolerance. Also, we sought to test whether use of a two-component overexpression system would produce any strengthening of the phenotype relative to the use of a 35S direct promoter-fusion.

[0708] Two new sets of 35S::G489 lines (301-320 and 421-440) have been obtained as part of the drought program.

[0709] Lines 301-320 harbored a 35S direct promoter-fusion construct (P51). The second batch of plants (421-440) overexpress G489 via the two component system.

[0710] Morphological Observations. Neither of the two sets of 35S::G489 plants showed any consistent differences in morphology to wild-type controls in either the T1 or T2 generations.

[0711] Physiology (Plate assays) Results. Lines harboring a 35S direct promoter-fusion construct or overexpressing G489 via the two component system have now been analyzed in abiotic stress assays. Five out of ten lines with a direct promoter fusion (P51) were more tolerant than wild-type seedlings in a cold germination assay. Three other lines were more tolerant in a chilling growth assay. Two lines were tolerant to dehydration stress in a severe drought plate based assay.

[0712] Only two lines were more tolerant to dehydration stress and one other line tolerant to cold in germination assays for lines harboring the two-component system for driving 35S expression.

[0713] This result is the opposite of that observed when we compared direct promoter fusions versus two-component systems. Normally the two-component system is more robust than direct promoter fusions in generating phenotypes.

[0714] Discussion. New sets of 35S::G489 lines derived from direct promoter fusions or the two-component system were created and characterized morphologically. Neither of the two sets of plants showed any consistent differences in morphology from wild type controls.

[0715] Potential applications. Based on the results of these and previous experiments, genes for other NF-Y subunits, as well as the YB class, can produce abiotic stress tolerance when overexpressed. G489, as a member of the YC class is evidence of this; the gene could potentially be applied to enhance tolerance to abiotic stress such as drought and cold.

G926 (SEQ ID NO: 51 and 52; Arabidopsis thaliana)—KO

[0716] Background. G926 is an Arabidopsis gene which is a member of the HAP2 (NF-YA) subfamily of the CCAAT-box binding transcription factors. Since the NF-Y factors are known to act as trimeric complexes (comprising YA, YB, and YC subunits) we are testing whether genes for the other subunits (YCs and YAs) can confer drought tolerance in a comparable manner to genes encoding the YB subunit class to which G481 belongs.

[0717] A G926 knockout line was isolated and carries a T-DNA insertion at ˜425 bp downstream of the G926 ATG. This line was examined morphologically and tested in stress assays, and was found to show tolerance to abiotic stresses such as NaCl, sucrose, and ABA.

[0718] Since the original genomics screen, RT-PCR has been performed to confirm the absence of a wild-type G926 transcript (using a pair of primers that spanned the T-DNA insertion) in this line. However, it should be noted that a product was obtained in RT-PCR experiments with a pair of primers that were both 5′ to the T-DNA insertion point. Thus, it is possible that a truncated variant of G926 was expressed in these lines, but it is not clear whether or not the allele would have been functional.

[0719] Morphological Observations. During the original genomics screens, we analyzed a homozygous KO.G926 line. Plants from that line showed wild-type morphology. Additional homozygous plants have been examined under 24-hour light conditions. These plants also exhibited no consistent difference in morphology to wild-type controls.

[0720] Physiology (Plate assays) Results. Lines with a knockout of G926 were more tolerant than wild-type seedlings in several abiotic stress assays, including, NaCl (8 of 10 lines tested), ABA (10 of 10 lines), sucrose germination assays (8 of 10 lines), severe dehydration (4 of 10 lines), and a chilling growth assay (10 of 10 lines). Ten different seed lots derived from individual homozygous plants for the same T-DNA insertion allele were tested in these assays.

[0721] Physiology (Soil Drought-Clay Pot) Summary. Two separate lines with a knockout of G926 showed better performance in a soil-based drought assay than controls, and one of these lines recovered better from the drought treatment than the controls.

[0722] Discussion. We have so far been unable to identify additional KO.G926 alleles in the public collections. However, we have now re-analyzed our original KO.G926 line and confirmed the stress tolerance effects seen in plate based assays.

[0723] Potential applications. G926 may be used to regulate abiotic stress tolerance traits. In particular, the strong positive data from plate based assays support the notion that a knock-down approach on NF-Y family genes may be a viable method of achieving stress tolerance in commercial crops such as maize and soy.

G928 (SEQ ID NO: 399 and 400; Arabidopsis thaliana)—Constitutive 35S

[0724] Background. G928 is an Arabidopsis member of the HAP2 (NF-YA) subfamily of the CCAAT-box binding transcription factors. Since the NF-Y factors are known to act as trimeric complexes (comprising YA, YB, and YC subunits) genes for the other subunits (YCs and YAs) such as G928 were tested to determine whether these sequences can confer drought tolerance in a comparable manner to genes encoding the YB subunit class to which G481 belongs.

[0725] Morphological Observations. 35S::G928 lines exhibited a wild-type morphology.

[0726] Physiology (Plate assays) Results. Ten of 10 lines tested were more tolerant than wild type in a cold germination assay. Five of those lines were also more tolerant to sucrose in a separate germination assay.

[0727] Discussion. Drought assays have not yet been performed with G928 constitutive overexpressing lines. However, the tolerance in sucrose and cold germination assays that was observed suggests that G928 overexpression will confer tolerance to abiotic stress, including hyperosmotic stresses.

[0728] Potential applications. The abiotic stress results coupled with the wild-type morphology and development exhibited by these lines, this sequence is an excellent candidate for conferring stress tolerance in commercially important plants.

G1836 (SEQ ID NO: 47 and 48; Arabidopsis thaliana)—Constitutive 35S

[0729] Background. G1836 is a member of the HAP5 (NF-YC) subfamily of the CCAAT-box binding transcription factors. Since the NF-Y factors are known to act as trimeric complexes (comprising YA, YB, and YC subunits) we are testing whether genes for the other subunits (YCs and YAs) can confer drought tolerance in a comparable manner to genes encoding the YB subunit class to which G481 belongs.

[0730] Plants overexpressing G1836 were somewhat paler green than the wild-type controls in morphology assays. 35S::G1836 lines also showed enhanced tolerance in salt stress germination assays. The aim of this study was to re-assess the effects of G1836 on tolerance to drought-related stress.

[0731] Morphological Observations. Three independent batches of 35S::G1836 (2-component) T1 lines (301-313; 361-372; 381-386) were examined. Many of the plants showed a variety of morphological changes including: reduced overall size, abnormal leaf shape and coloration (some lines were slightly yellow), vertically oriented leaves, slightly delayed flowering or slow growth, reduced apical dominance, and floral abnormalities that resulted in poor fertility. It should be noted, however, that a number of lines showed no consistent differences to wild type. The effects seen with 2-component are similar to those exhibited by the 35S::G1836 direct fusion lines.

[0732] Line 306 was small and showed the pleiotropic effects described above. Line 384 also showed the showed the pleiotropic effects described.

[0733] In the T2 generation, one of six T2-306 plants was slightly pale with serrated leaves, five of six appeared wild type.

[0734] T2-384 plants were grown on two different plant dates. On one of these dates, the plants appeared wild type, but on the second date were pale and slightly early flowering. This response might depend on variables such as growth temperature, which could have differed between the two plantings.

[0735] Physiology (Plate assays) Results. G1836 overexpressing lines showed more seedling vigor in response to salt stress in a germination assay compared to wild-type control plants. These results were confirmed when seedlings of ten new (2-component) lines overexpressing G1836 were re-examined in the current program. Six of the lines tested were more tolerant than wild type in a salt germination assay. Four of those lines were also more tolerant to sucrose and ABA in separate germination assays. Two of those four lines also were more tolerant than controls in a chilling growth assay.

[0736] Physiology (Soil Drought-Clay Pot) Summary. 35S::G1836 transformants exhibited an enhanced performance in a “whole pot” soil drought assay. Two (306 and 384) of three lines tested showed significantly improved survival compared to wild type. It should be noted that in an independent planting these lines showed no consistent difference to controls. In that experiment, however, the plants were dried down excessively (note very low soil drought scores); it could thus be the case that G1836 affords protection against moderate, but not severe drought stress.

TABLE 41
35S::G1836 drought assay results:

| | | Mean | Mean | p-value for | Mean | Mean | |
|---|---|---|---|---|---|---|---|
| | Project | drought | drought | drought score | survival for | survival for | p-value for difference |
| Line | Type | score line | score | difference | line | control | in survival |
| 306 | TCST | 0 | 0.37 | 0.28 | 0.060 | 0.063 | 0.89 |
| 306 | TCST | 4.7 | 1.0 | 0.0011* | 0.96 | 0.29 | 0.000000000011* |
| 384 | TCST | 0 | 0.37 | 0.28 | 0.036 | 0.063 | 0.33 |
| 384 | TCST | 2.5 | 1.0 | 0.018* | 0.61 | 0.29 | 0.0000057* |

TCST = two-components-supertransformation project
Survival = proportion of plants in each pot that survived
Drought scale: 6 (highest score) = no stress symptoms, 0 (lowest score; most severe effect) = extreme stress symptoms
*line performed better than control (significant at P < 0.11)

[0737] Discussion. Many of the 35S::G1836 (2-component) lines obtained during the current study showed a complex variety of morphological changes including reduced overall size, abnormal leaf shape and coloration, vertically oriented leaves and alterations in flowering time. Additionally, some lines had reduced apical dominance, and floral abnormalities that resulted in poor fertility.

[0738] It should be emphasized that we have observed similar stress-tolerance phenotypes for several G481 related genes including G482, G485 and G1820. The comparable effects indicate that the genes are functionally related.

[0739] Potential applications. The results of this study strengthen our earlier conclusions that G481 and the related genes are excellent candidates for improvement of drought related stress tolerance in commercial species. Additionally, the results strongly implicate genes for the other subunits, such as G1836, in addition to the YBs (HAP3s), in conferring drought related stress tolerance. However, given some of the morphological off-types obtained from constitutive G1836 expression, it might be necessary to optimize the expression of the transgene by use of tissue specific or conditional promoters.

G2345 (SEQ ID NO: 21 and 22; Arabidopsis thaliana)—Constitutive 35S

[0740] Background. G2345 is a closely-related Arabidopsis homolog of G481, and is a member of the HAP3 (NF-YB) sub-group of the CCAAT-box binding transcription factor family. Based on phylogenetic and sequence analysis, the G2345 protein lies within the G481 (rather than the G482/G485) sub-clade and is most closely related to G1364. The aim of this study was to re-evaluate the effects of G2345 overexpression and determine whether the gene confers similar effects to G481.

[0741] Morphological Observations. We have now generated 35S lines for G2345 using the two component system; no consistent differences in morphology were observed compared to wild-type controls. It should be mentioned that a slight acceleration of flowering was noted in some of the lines, but that this was inconsistent across different plantings and could have depended on variables such as growth temperature. Some changes in leaf shape were also noted, but again, this effect was not consistent across lines.

[0742] Three batches of T1 lines were obtained. Some size variation was apparent in the second batch of plants, but plants from the other batches appeared wild type.

[0743] Four lines were examined in the T2 generation. T2-389 plants showed some size variation (small at early stages) and some individuals had short broad leaves. T2-390 plants appeared wild type on two plant dates but were slightly early flowering on a third plant date. T2-393 plants appeared wild type in a first planting but were marginally early flowering in two other plantings. T2-400 plants were grown on a single date and showed slightly early flowering and displayed short broad leaves.

[0744] Physiology (Plate assays) Results. Four 35S::G2345 lines were more tolerant than wild-type seedlings in a germination assay under cold conditions.

[0745] Physiology (Soil Drought-Clay Pot) Summary. Data from soil drought assays indicate that overexpression of G2345 can confer drought tolerance in Arabidopsis.

[0746] Four independent 35S::G2345 lines were examined:

[0747] Line 393 performed significantly better than wild type in two different plantings of a whole pot assay. Line 393 was tested on a third date but showed a wild type response on that date. It should be noted though, that on that date, the drought treatment was particularly severe, suggesting that this gene confers tolerance to moderate but not severe drought.

[0748] Line 389 also performed significantly better than controls in a “whole pot” assay in one of the assays.

TABLE 42
35S::G2345 drought assay results:

| | | Mean | Mean | p-value for | Mean | Mean | p-value for |
|---|---|---|---|---|---|---|---|
| | Project | drought | drought | drought score | survival for | survival for | difference in |
| Line | Type | score line | score control | difference | line | control | survival |
| 389 | TCST | 1.0 | 0.22 | 0.069* | 0.18 | 0.063 | 0.011* |
| 389 | TCST | 1.1 | 0.67 | 0.15 | 0.26 | 0.20 | 0.19 |
| 393 | TCST | 2.3 | 0.22 | 0.0021* | 0.40 | 0.063 | 0.000000070* |
| 393 | TCST | 0.10 | 0.10 | 1.0 | 0 | 0.0071 | 0.34 |
| 393 | TCST | 0.58 | 1.0 | 0.15 | 0.15 | 0.26 | 0.12 |
| 393 | TCST | 0.40 | 0 | 0.078* | 0.036 | 0.014 | 0.27 |

TCST = two-components-supertransformation project
Survival = proportion of plants in each pot that survived
Drought scale: 6 (highest score) = no stress symptoms, 0 (lowest score; most severe effect) = extreme stress symptoms
*line performed better than control (significant at P < 0.11)

[0749] Discussion. We have now obtained three sets of 35S::G2345 lines using a two-component approach. These plants did not show any consistent alterations in morphology, although subtle effects on flowering time, overall size, and leaf shape were observed in some of the lines. However, 35S::G2345 lines did show positive results in physiology assays; a number of lines exhibited greater tolerance in a cold germination assay on plates and two lines were more tolerant in soil drought assays. Based on the stress tolerance effects obtained with G2345 overexpression, the protein has comparable activity to the G481 protein.

[0750] Potential applications. Given the results obtained thus far, G2345 may be used to confer tolerance to drought-related stress in commercial species.

G1248 (SEQ ID NO: 359 and 360; Arabidopsis thaliana)—Constitutive 35S

[0751] Background: G1248 represents a non-LEC1-like member of the HAP3 subfamily of CCAAT-box binding transcription factors, which based on our phylogenetic analysis, lies outside a clade containing the G481 and G482 groups. The aim of this study was to compare the effects of G1248, G481 and G482 overexpression and to determine whether proteins, related but outside the G481 and G482 clades, are capable of conferring abiotic stress tolerance.

[0752] Morphological Observations. We have now isolated and examined additional 35S::G1248 lines and found that overexpression of this gene produces complex effects on flowering time, plant size, growth rate and coloration.

[0753] Seventeen of 19 transformants were noted to be small and dark in coloration compared to controls. Four of 19 transformant lines, including line 339, were noted to be late developing. Two of 19 lines appeared wild type.

[0754] Six lines were examined in the T2 generation. In an initial planting three T2 lines were assessed. At early stages, T2-321 plants were noted to small with a few plants being dark in coloration. Similar phenotypes were seen at lower frequency in the T2 populations from two lines. Three further T2 populations were examined in a second planting. In this second planting, plants from all three of the T2 populations, including line 339, were small and slightly early developing compared to wild-type. This latter phenotype was similar to that reported in our initial genomics screens.

[0755] That the early developing phenotype was not equally apparent in different generations and planting dates demonstrates that such effects are complex and are likely to be heavily influenced by variables like temperature, light intensity, air flow, and transgene expression level which might have differed between lines and experiments.

[0756] Physiology (Plate assays) Results. Three of 10 lines tested were more tolerant than wild-type controls in a cold growth assay.

[0757] Physiology (Soil Drought-Clay Pot) Summary. One line, #339, showed significant evidence of greater drought tolerance than controls, including wild-type and CBF4-overexpressors.

TABLE 43
35S::G1248 drought assay results:

| | | | Mean | Mean | p-value for | Mean | Mean | p-value for |
|---|---|---|---|---|---|---|---|---|
| | Project | | drought | drought | drought | survival | survival for | difference |
| Line | Type | Control | score line | score control | score | for line | control | in survival |
| 339 | DPF | CBF4 OEX | 1.5 | 1.9 | 0.22 | 0.29 | 0.30 | 0.79 |
| 339 | DPF | CBF4 OEX | 1.8 | 1.5 | 0.52 | 0.23 | 0.11 | 0.013* |
| 339 | DPF | Wild type | 2.3 | 1.7 | 0.12 | 0.50 | 0.40 | 0.098* |
| 339 | DPF | Wild type | 1.8 | 0.90 | 0.015* | 0.30 | 0.16 | 0.0079* |

DPF = Direct promoter fusion
OEX = overexpressor
Survival = proportion of plants in each pot that survived
Drought scale: 6 (highest score) = no stress symptoms, 0 (lowest score; most severe effect) = extreme stress symptoms
*line performed better than control (significant at P < 0.11)

[0758] Discussion: During earlier genomics screens, 35S::G1248 lines exhibited accelerated flowering. We have now isolated additional 35S::G1248 lines and these exhibited rather complex changes in flowering time, plant size, growth rate and coloration. Many of the primary transformants were somewhat small, slow developing, and dark in coloration. Later, a number of T2 populations were morphologically examined and some of these showed accelerated flowering. It should be emphasized that the early developing phenotype was of variable penetrance and was therefore potentially influenced by variables like temperature, light intensity, air flow, and transgene expression level (which might have differed between lines and plantings).

[0759] Potential Applications: G1248 may be used to modify floral transition. The gene might also be used to confer tolerance to abiotic stress, in particular to cold or drought conditions.

G634 (SEQ ID NO: 49 and 50; Arabidopsis thaliana)—Constitutive 35S

[0760] Background. G634 (AT1G33240) was initially identified as two public partial cDNAs sequences (GTL1 and GTL2) which are splice variants of the same gene (Smalle et al, 1998). The published expression pattern shows that G634 is highly expressed in siliques and not expressed in leaves, stems, flowers or roots.

[0761] Three constructs were initially made for G634: P324, P1374 and P1717 contained a genomic clone of G634. P1374 and P1717 contain G634 cDNAs, with P1717 being the longer variant. Overexpression lines for P1717 were never analyzed during our genomics program. However lines for P324 showed some variable effects on size, but otherwise appeared wild type. Lines for P1374 exhibited an increase in trichome density on leaves and stems, but in other respects appeared wild type.

[0762] 35S::G634 lines for P324 and P1374 showed a strong performance during our initial soil drought screens. Additionally, our array experiments on plants undergoing a soil-drought treatment indicated that G634 shows a small but significant up-regulation specifically in the recovery phase, following re-watering at the end of the drought.

[0763] 35S::G634 lines also showed a shade tolerant phenotype.

[0764] This current project was initiated to analyze a greater number of G634 lines for stress tolerance phenotypes and to compare the effects of the different splice variants for G634 (see sequence section for details).

[0765] Morphological Observations. Additional sets of 35S::G634 lines have now been obtained for each of three different clones (see sequence section for details). Each of the clones produced an increase in trichome size/density when overexpressed.

[0766] Lines transformed with P1374 ere noted to have an increase in trichome density. The trichomes on these individuals also were larger than in wild type. Some of the lines were also rather late developing.

[0767] Lines generated with P324 were slightly small, with two lines showing slightly larger and more dense trichomes than controls. Two lines were slightly small and had an increase in trichome density/slightly larger trichomes relative to the control. The remaining lines appeared wild type.

[0768] Lines generated with P1374 were slightly small at early stages. A significant number showed increased trichome density. An increase in trichome size was noted in many of these lines.

[0769] Lines transformed with P1717 exhibited enlarged trichomes, and a majority of these had an apparent increase in trichome density. A substantial number of the lines were also markedly early flowering.

[0770] Physiology (Plate assays) Results. Three different PIDs for 35S::G634 were analyzed in abiotic stress assays. Overall, when all PIDs are combined, 9 out of 30 lines were more tolerant than wild-type seedlings in a plate based severe dehydration assay. Six out of 30 lines also had more root growth. When individual PIDs are considered, P1717 and P324 had 5 out of 10 lines and 3 out of 10 lines that were more tolerant than controls in the dehydration assay. P1717 and P1374 each had three out of 10 lines with more root growth than controls.

[0771] Physiology (Soil Drought-Clay Pot) Summary. In soil-based assays, most of the G634 overexpressing lines tested performed better than wild-type controls with regard to drought tolerance and recovery from drought treatment.

[0772] Discussion. We have now obtained lines for each of the three G634 overexpression clones, and in each case observed an increase in trichome density along with a potential increase in trichome size. Lines for the longest cDNA clone (P1717) also exhibited early flowering. Lines for each of the clones were tested in plate based assays and were more tolerant than wild-type in the severe dehydration assay. Lines for each of the two cDNA clones also showed more vigorous root growth than controls when grown on plates.

[0773] Potential applications. G634 has a wide range of potential applications including enhancing tolerance to various abiotic stresses, conferring shade tolerance, modulating flowering time, and modulating trichome structure/density, thus improving insect tolerance and accumulation of valuable secondary metabolites.

G1818 (SEQ ID NO: 403 and 404; Arabidopsis thaliana)—Constitutive 35S

[0774] Background. G1818 is an Arabidopsis gene which is a member of the HAP5 (NF-YC) subfamily of the CCAAT-box binding transcription factors. Since the NF-Y factors are known to act as trimeric complexes (comprising YA, YB, and YC subunits) genes for the other subunits (YCs and YAs) were tested to determine whether they confer drought tolerance in a comparable manner to genes encoding the YB subunit class to which G481 belongs. 35S::G1818 lines were examined during an earlier genomics screen and were found to be late flowering and have increased seed protein content. Additionally, 35S::G1818 lines gave positive results in a C/N sensing screen.

[0775] Morphological Observations. A number of G1818 overexpressing lines had upright, serrated leaves and were lighter green and late developing as compared with wild-type plants. Some lines showed no consistent differences relative to controls.

[0776] Physiology (Elate assays) Results. In the limited number of assays that have been performed thus far, G1818 overexpressors (3/10 lines) have been shown to confer greater tolerance to severe desiccation in plate based assays than wild-type controls.

[0777] Discussion. We have now obtained lines for G1818 overexpression clones. A number of lines were late developing and were distinct from wild type in that they were small, paler and later developing.

[0778] Potential applications. G1818 and related genes may be used to improve abiotic stress tolerance in plants, including drought related stress tolerance. These results implicate genes for the other subunits, such as G1818, in addition to the YBs (HAP3s), in conferring drought related stress tolerance.

G1820 (SEQ ID NO: 42 and 44; Arabidopsis thaliana)—Constitutive 35S

[0779] Background. G1820 is a member of the HAP5 (NF-YC) subfamily of the CCAAT-box binding transcription factors. Since the NF-Y factors are known to act as trimeric complexes (comprising YA, YB, and YC subunits) we are testing whether genes for the other subunits (YCs and YAs) can confer drought tolerance in a comparable manner to genes encoding the YB subunit class to which G481 belongs.

[0780] G1820 overexpression lines flowered earlier than controls. In physiology assays, these plants showed more tolerance to salt stress and ABA in separate germination assays. In a severe dehydration assay, 35S::G1820 seedlings were more tolerant compared to wild-type controls. The aim of this study was to re-assess the effects of G1820 overexpression on drought-related stress tolerance.

[0781] Morphological Observations. Many of the transformants showed a variety of morphological changes including reduced overall size, abnormal leaf shape and coloration (some lines were slightly yellow) and reduced apical dominance. A number of the lines also flowered earlier than controls. These phenotypic effects were generally more severe than those shown by 35S::G1820 direct fusion lines, suggesting that higher levels of G1820 activity might have been obtained using the 2-component system.

[0782] Physiology (Plate assays) Results. 35S::G1820 lines showed more tolerance to salt stress and insensitivity to ABA in separate germination assays. On a severe water deprivation assay, seedlings were more tolerant compared to wild-type controls.

[0783] A similar enhanced resistance to ABA was observed in eight of ten new 35S::G1820 (two-component) lines that were examined (no severe dehydration tolerance was observed however). In addition, these lines were more tolerant than wild-type to varying extents in several other assays including sucrose, salt, mannitol, and cold.

[0784] Physiology (Soil Drought-Clay Pot) Summary. 35S::G1820 lines showed a significantly enhanced performance before and after a period of drought as compared to wild type.

TABLE 44
35S::G1820 drought assay results.

| | | Mean | | p-value for | Mean | Mean | p-value for |
|---|---|---|---|---|---|---|---|
| | Project | drought | Mean drought | drought score | survival for | survival for | difference in |
| Line | Type | score line | score control | difference | line | control | survival |
| 2 | DPF | 2.0 | 0.71 | 0.37 | 0.27 | 0.17 | 0.017* |
| 3 | DPF | 3.0 | 1.7 | 0.21 | 0.58 | 0.24 | 0.023* |
| 5 | DPF | 3.0 | 1.7 | 0.066* | 0.36 | 0.24 | 0.082* |
| 7 | DPF | 3.0 | 1.7 | 0.21 | 0.69 | 0.24 | 0.0020* |
| 7 | DPF | 2.5 | 0.71 | 0.031* | 0.29 | 0.17 | 0.045* |
| 14 | DPF | 3.5 | 0.71 | 0.0016* | 0.37 | 0.17 | 0.000014* |

DPF = direct promoter fusion project
Survival = proportion of plants in each pot that survived
Drought scale: 6 (highest score) = no stress symptoms, 0 (lowest score; most severe effect) = extreme stress symptoms
*line performed better than control (significant at P < 0.11)

[0785] Discussion. Two-component 35S::G1820 lines have now been examined; a wide range of morphological alterations were observed, similar to those seen in our previous studies.

[0786] It should be emphasized that we have observed stress tolerance phenotypes for several other G481 related genes including G482, G485 and G1836. The similar effects seen when these genes are overexpressed strongly indicate that they are functionally related, at least with respect to the stress tolerance phenotype.

[0787] Potential applications. The results of this study strengthen our earlier conclusions that G481 and the related genes are excellent candidates for improvement of drought related stress tolerance in commercial species. Additionally, the results strongly implicate genes for the other subunits, such as G1820, in addition to the YBs (HAP3s), in conferring drought related stress tolerance. In addition to the effects on stress tolerance, G1820 could be used for manipulating flowering time; the gene may be particularly suitable in cases where an acceleration or induction of flowering is desired.

G1781 (SEQ ID NO: 55 and 56; Arabidopsis thaliana)—Constitutive 35S

[0788] Background. G1781 (SEQ ID NO: 56) represents a non-LEC1-like member of the HAP3 subfamily of CCAAT-box binding transcription factors, which based on our phylogenetic analysis of the Arabidopsis proteins, lies outside the clade containing the G481 and G482 groups. The aim of this study was to compare the effects of G1781, G481 and G482 overexpression and to determine whether proteins from outside the G481 and G482 clades are capable of conferring abiotic stress tolerance.

[0789] Morphological Observations. Overexpression of G1781 produced a number of developmental changes including accelerated flowering, dwarfing and rather spindly inflorescences.

[0790] Discussion. Previously, we observed that 35S::G1781 lines were early flowering, in a comparable manner to 35S::G482 lines. In the present study, we isolated a new batch of 35S::G1781 lines; again these lines showed early flowering, and some were markedly smaller than wild type. However, these lines exhibited a wild-type phenotype in plate based assays. 35S::G1781 lines were also tested in soil drought assays. One line did show a better performance than controls but the result was not obtained in a repeat experiment.

[0791] Potential application. Based on the results obtained to date, the clearest application for G1781 would be for modification of the floral transition. In particular, the gene may be suitable in cases where an acceleration or induction of flowering is desired.

G1334 (SEQ ID NO: 53 and 54; Arabidopsis thaliana)—Constitutive 35S

[0792] Background. G1334 is an Arabidopsis gene which is a member of the HAP2 (NF-YA) subfamily of the CCAAT-box binding transcription factors. Since the NF-Y factors are known to act as trimeric complexes (comprising YA, YB, and YC subunits) we are testing whether genes for the other subunits (YCs and YAs) can confer drought tolerance in a comparable manner to genes encoding the YB subunit class to which G481 belongs. 35S::G1334 lines were examined and were found to be small and dark in coloration. However, the transformants showed a wild-type response in all the physiology assays performed. The aim of this project is to analyze a greater number of lines for stress tolerance phenotypes.

[0793] Morphological Observations. A set of twenty new 35S::G1334 lines (#301-320) has been obtained. The majority of these transformants were small, with dark green compact rosettes and accelerated flowering versus wild type. Other lines were of wild-type size but still showed early flowering.

[0794] Discussion. A new set of 35S::G1334 has now been morphologically examined. These lines were early flowering, dark in coloration, and dwarfed relative to controls.

[0795] Potential applications. G1334 may be used to modify flowering time or plant development.

G2539 (SEQ ID NO: 407 and 408; Arabidopsis thaliana)—Constitutive 35S

[0796] Background. G2539 encodes an AP2 family protein and was identified as an upstream activator of G481.

[0797] Morphological Observations. 35S::G2539 lines were examined during earlier genomics screens and were found to small, dark in coloration, and have alterations in flowering time. Some lines flowered early, others late. Yet other lines had no differences in flowering time relative to controls.

[0798] Physiology (Plate assays) Results. Three of 10 lines were more tolerant than wild type in cold germination assays.

[0799] Potential applications. Based on the results obtained so far, G2539 may be used to enhance tolerance to abiotic stresses such as cold.

G3074 (SEQ ID NO: 409 and 410; Arabidopsis thaliana)—Constitutive 35S

[0800] Background. G3074 is an Arabidopsis gene which is a member of the HAP-like subfamily of the CCAAT-box binding transcription factors. Since the NF-Y factors are known to act as trimeric complexes we are testing whether genes for the other subunits can confer drought tolerance in a comparable manner to genes encoding the YB subunit class to which G481 belongs.

[0801] 35S::G3074 lines were examined during earlier, limited genomics screen and showed a wild-type response in all assays. The most recent data were obtained project to analyze a greater number of lines for stress tolerance phenotypes.

[0802] Morphological Observations. At the seedling stage, some lines were small compared to controls. At later stages, the overexpressing lines generally were similar to wild-type in morphology and development.

[0803] Physiology (Plate assays) Results. Five of 10 overexpressing lines tested were more tolerant than wild type in plate-based severe desiccation assays.

[0804] Potential applications. Based on the results obtained so far, G3074 may be used to enhance tolerance to drought-related stresses in plants.

G3396 (SEQ ID NO: 41 and 42; Oryza sativa)—Constitutive 35S

[0805] Background. G3396 is an NF-YB gene from Oryza sativa and lies within the G481 sub-clade. G3396 corresponds to OsHAP3B and has been recently been shown to influence chloroplast biogenesis (Miyoshi et al., 2003). The aim of this study was to assess the role of this gene in drought stress-related tolerance, and to compare the effects with those of other G481-related genes.

[0806] Morphological Observations. 35S::G3396 lines exhibited a moderate delay in the onset of flowering (1-2 weeks under 24-hour light conditions) and produced rather dark leaves, which, at later stages, became enlarged and downward curled at the margins.

[0807] Physiology (Plate assays) Results. Five out of ten 35S::G3396 lines were more tolerant than wild-type seedlings in a cold germination assay. Three of these lines also performed better than wild-type on plates containing ABA.

[0808] Discussion. 35S::G3396 lines showed delayed flowering, a dark coloration, and produced leaves that became rather enlarged and curled, particularly at late stages. These phenotypes were somewhat comparable to those seen in 35S::G481 lines, indicating that the two proteins have similar activities. 35S::G3396 lines also showed positive results in plate assays and displayed more tolerance relative to controls in cold germination and were less sensitive to ABA in germination experiments. Some evidence of drought tolerance was detected in soil based assays under 24-hr light: two lines showed less severe stress symptoms than wild-type at the end of a drought period, but this effect was not consistently obtained between different plantings.

[0809] Potential applications. Based on the results obtained so far, G3396 has a similar activity to G481 and may be applied to enhance tolerance to abiotic stresses such as drought and cold. From the morphological phenotypes seen in 35S::G3396 lines, the gene could be applied to modify flowering time, leaf shape, or biomass. The dark coloration could be indicative of increased chlorophyll levels; thus G3396 might improve photosynthetic capacity and yield.

G3397 (SEQ ID NO: 35 and 36; Oryza sativa)—Constitutive 35S

[0810] Background. G3397 is an NF-YB gene from Oryza sativa and is phylogenetically more closely related to Arabidopsis G485/G482 than G481. G3397 corresponds to OsHAP3C and has been recently been shown to influence chloroplast biogenesis (Miyoshi et al., 2003). The aim of this study was to assess the role of G3397 in drought-related stress tolerance via overexpression, and compare the effects with that of the other G481-related genes.

[0811] Morphological Observations. 35S::G3397 lines exhibited a distinct acceleration in the onset of flowering (1-2 weeks under 24-hour light). 35S::G3397 lines also showed a reduction in overall size compared to controls. Such effects were also obtained in each of three T2 populations that were morphologically examined.

[0812] Physiology (Plate assays) Results. Four out of ten 35S::G3397 lines were more tolerant than wild-type seedlings in a cold germination assay. Additionally, seedlings of a number of the lines were somewhat larger and more vigorous than wild-type seedlings when grown on regular control plates without stress treatments.

[0813] Discussion. 35S::G3397 lines showed a very marked acceleration in flowering time, along with a reduction in overall plant size compared to wild type. A comparable phenotype has been obtained from overexpression of the two the most closely related Arabidopsis genes G485 and G482, indicating that G3397 has a similar activity to those proteins. 35S::G3397 lines have been tested in plate based abiotic stress assays; positive results were obtained in a cold germination assay. In particular, it is worth highlighting that 35S::G485 lines also were more tolerant in that assay, which further argues that G3397 has comparable activity to G485. Additionally, some of 35S::G3397 the lines showed enhanced seedling vigor compared to controls when grown on regular MS media without a stress treatment.

[0814] Potential applications. Based on the results so far obtained, G3397 may be applied to modify flowering time. The data from plate based assays indicate that the gene could be used to engineer abiotic stress resistance, and in particular, traits such as cold/wet germination.

G3398 (SEQ ID NO: 39 and 40; Oryza sativa)—Constitutive 35S

[0815] Background. G3398 is phylogenetically more closely related to Arabidopsis G485/G482 than G481. The aim of this study was to assess the role of G3398 in drought stress-related tolerance via overexpression, and compare the effects with those of the other G481-related genes.

[0816] Morphological Observations. 35S::G3398 lines exhibited a distinct acceleration in the onset of flowering (1-2 weeks under 24-hour light). Such effects were also seen in each of three T2 populations that were morphologically examined. 35S::G3398 lines exhibited a reduction in overall size compared to controls.

[0817] Physiology (Soil Drought—Clay Pot) Summary. 35S::G3398 lines showed a significantly enhanced performance in soil drought assays compared to wild type.

[0818] Three lines (#301, 303, and 304) showed significantly better performance than controls. On a later planting date, line 302 also showed significantly better survival than controls.

TABLE 45
35S::G3398 drought assay results:

| | | Mean | Mean | p-value for | Mean | Mean | |
|---|---|---|---|---|---|---|---|
| | Project | drought | drought | drought score | survival | survival for | p-value for difference in |
| Line | Type | score line | score | difference | for line | control | survival |
| 301 | DPF | 3.3 | 1.4 | 0.033* | 0.45 | 0.16 | 0.000000041* |
| 301 | DPF | 2.3 | 2.3 | 0.89 | 0.34 | 0.39 | 0.38 |
| 302 | DPF | 3.0 | 2.3 | 0.43 | 0.53 | 0.39 | 0.022* |
| 303 | DPF | 3.3 | 1.4 | 0.027* | 0.30 | 0.16 | 0.11 |
| 303 | DPF | 2.7 | 2.3 | 0.76 | 0.39 | 0.39 | 0.75 |
| 304 | DPF | 4.6 | 1.4 | 0.00091* | 0.58 | 0.16 | 0.0000000000000011* |

DPF = direct promoter fusion project
Survival = proportion of plants in each pot that survived
Drought scale: 6 (highest score) = no stress symptoms, 0 (lowest score; most severe effect) = extreme stress symptoms
*line performed better than control (significant at P < 0.11)

[0819] Discussion. 35S::G3398 lines showed a 1-2 week acceleration in flowering time, compared to wild type. These early flowering lines were also markedly smaller than controls, and only small quantities of seed were obtained. As a result, only six lines were tested in plate-based physiology assays; no consistent difference in performance to controls was seen in those experiments. Nonetheless, 35S::G3398 lines did show enhanced tolerance in soil drought assays. The early flowering and drought tolerance phenotypes observed in 35S::G3398 lines were very similar to those seen in overexpression lines for G485 or G482, indicating that G3398 has comparable activity to those proteins.

[0820] Potential applications. Based on the results from these studies, G3398 could be applied to effect tolerance to drought-related stress. Additionally, G3398 could be used to modify flowering time; the gene may be particularly suitable in cases where an acceleration or induction of flowering is desired.

G3429 (SEQ ID NO: 57 and 58; Oryza sativa)—Constitutive 35S

[0821] Background. G3429 (SEQ ID NO: 57) is from Oryza sativa and was included in the drought program as a related gene to G481. From our phylogenetic analysis, G3429 is more distantly related to G481 than the other non-Arabidopsis genes and was included in this study as an example of an outlier. The gene encodes a protein corresponding to OsNF-YB 1 and has been shown to form a ternary complex with a MADS protein OsMADS18 (Masiero et al., 2002). The aim of this project was to assess the role of G3429 in drought stress-related tolerance, and to compare the effects with those of the other G481 related genes.

[0822] Morphological Observations. A significant number of 35S::G3429 lines exhibited a mild delay in the onset of flowering. Some lines exhibited late flowering and rather narrow leaves.

[0823] Physiology (Plate assays) Results. Six out of ten 35S::G3429 lines were more tolerant than wild-type seedlings in a germination assay in the presence of sodium chloride.

[0824] Discussion. Out of twenty 35S::G3429 T1 plants examined, six were notably late flowering and had narrow leaves compared to wild type. Plate-based stress assays revealed that 35S::G3429 lines had a marked enhancement in salt tolerance during germination relative to controls. The effects on flowering time and the plate assay results were somewhat similar to the results from overexpression of G481 and some of the G481-related proteins such as G3470. Thus, the G3429 protein could have influenced some of the same pathways which were acted on by those transcription factors.

[0825] Potential applications. Based on the results obtained to date, G3429 may be applied to effect abiotic stress tolerance, and in particular to enhance traits such as salinity tolerance. The gene might also be used to modify leaf development or to manipulate the floral transition, and could be of use in circumstances where a repression of reproductive growth is desired.

G3434 (SEQ ID NO: 11 and 12; Zea mays)—Constitutive 35S

[0826] Background. G3434 is an NF-YB gene from Zea mays and lies within the G481 sub-clade. G3434 is an ortholog of the rice protein, G3395. The aim of this study was to assess the role of G3434 in drought-related stress tolerance via overexpression, and compare the effects with that of the other NF-Y genes.

[0827] Morphological Observations. Overexpression of G3434 produced a moderate acceleration in the onset of flowering in many of the lines (about 2-5 days sooner than wild-type controls under continuous light conditions).

[0828] Physiology (Plate assays) Results. 35S::G3434 seedlings were more tolerant than wild-type seedlings in several abiotic stress assays. Out of eighteen total lines, nine, six, or four lines did better in germination assays where media contained sodium chloride, mannitol, or sucrose respectively. Seven out of eighteen lines did better in a severe plate based dehydration assay, and four of eighteen lines were more tolerant than wild type in a cold germination assay.

[0829] Physiology (Soil Drought-Clay Pot) Summary. Two lines of 35S::G3434 performed better than controls in terms of drought tolerance and recovery from drought in soil based assays.

[0830] Discussion. The majority of 35S::G3434 lines plants showed an acceleration in the onset of flowering. It should be noted that several other G481 homologs have been implicated in modulating flowering time indicating that G3434 has a similar activity. Interestingly, though, although G3434 lies within the same sub-clade as G481, the effects on flowering time were different; 35S::G481 lines were predominantly late flowering.

[0831] Potential applications. Based on the results obtained, G3434 has similar effects to other genes from the G481 study and may be used to enhance resistance to abiotic stresses such as cold, drought, and salinity. The gene might also be applied to regulate flowering time.

G3435 (SEQ ID NO: 29 and 30; Zea mays)—Constitutive 35S

[0832] Background. G3435 is an NF-YB gene from Zea mays and is phylogenetically more closely related to Arabidopsis G485/G482 than G481. The aim of this study was to assess the role of G3435 in drought stress-related tolerance via overexpression, and to compare the effects with those of the other NF-Y genes.

[0833] Morphological Observations. 35S::G3435 lines exhibited a distinct acceleration in the onset of flowering (1-2 weeks under 24-hour light). In general, the early flowering lines also accumulated less vegetative biomass than wild type. Equivalent effects on flowering time were also obtained in three T2 populations that were examined.

[0834] Physiology (Soil Drought-Clay Pot) Summary. 35S::G3435 lines showed a significantly better performance than controls in soil drought assays. Five of six lines tested out-performed wild-type in one or more runs of a “whole pot” soil drought assay.

TABLE 46
35S::G3435 drought assay results:

| | | | Mean | | | | |
|---|---|---|---|---|---|---|---|
| | | Mean | drought | p-value for | Mean | Mean | |
| | Project | drought | score | drought score | survival for | survival for | p-value for difference |
| Line | Type | score line | control | difference | line | control | in survival |
| 301 | DPF | 2.3 | 1.4 | 0.25 | 0.16 | 0.16 | 0.64 |
| 301 | DPF | 3.7 | 2.3 | 0.15 | 0.51 | 0.39 | 0.045* |
| 306 | DPF | 4.3 | 1.4 | 0.0057* | 0.51 | 0.16 | 0.0000000000082* |
| 306 | DPF | 1.3 | 2.3 | 0.33 | 0.40 | 0.39 | 0.94 |
| 308 | DPF | 2.3 | 1.4 | 0.38 | 0.33 | 0.16 | 0.000082* |
| 308 | DPF | 2.7 | 2.3 | 0.64 | 0.52 | 0.39 | 0.027* |
| 309 | DPF | 1.3 | 0.56 | 0.065* | 0.36 | 0.079 | 0.0000033* |
| 309 | DPF | 0.83 | 1.2 | 0.24 | 0.12 | 0.17 | 0.19 |
| 311 | DPF | 0.67 | 0.56 | 0.69 | 0.15 | 0.079 | 0.092* |
| 311 | DPF | 1.3 | 1.3 | 1.0 | 0.18 | 0.18 | 1.0 |

DPF = direct promoter fusion project
Survival = proportion of plants in each pot that survived
Drought scale: 6 (highest score) = no stress symptoms, 0 (lowest score; most severe effect) = extreme stress symptoms
*line performed better than control (significant at P < 0.11)

[0835] Discussion. The early flowering and drought tolerance phenotypes observed in 35S::G3435 lines were very similar to those seen in overexpression lines for G485 or G482, indicating that G3435 has comparable activity to those proteins. Surprisingly, 35S::G3435 lines showed a wild-type performance in most of the plate based assays, and in fact a small number of lines showed a worse performance in a heat growth assay. It is possible that these poorly performing lines represented events where the transgene was becoming silenced.

[0836] Potential applications. Based on the results from these studies, G3435 could be applied to effect tolerance to drought related stress. Additionally, G3435 could be used to modify flowering time; the gene may be particularly suitable in cases where an acceleration or induction of flowering is desired.

G3436 (SEQ ID NO: 33 and 34; Zea mays)—Constitutive 35S

[0837] Background. G3436 is an NF-YB gene from Zea mays and lies within the G482/G485 sub-clade. The aim of this study was to assess the role of G3436 in drought-related stress tolerance via overexpression, and to compare the effects with those of other NF-Y genes.

[0838] Morphological Observations. Overexpression of G3436 in Arabidopsis produced a striking acceleration in the onset of flowering (by approximately 1 week under 24-hour light conditions). In addition to the effects on flowering time, the lines also showed a reduction in vegetative biomass relative to controls. Such effects were observed in each of three batches of transformants, as detailed below. Three lines were examined in the T2 generation and comparable effects on flowering time and size were observed.

[0839] Physiology (Plate assays) Results. Six out of ten 35S::G3436 lines more tolerant than wild-type seedlings in a heat germination assay. Two of these lines also were more tolerant to cold germination or chilling growth assays than wild-type controls.

[0840] Discussion. It is noteworthy that such an acceleration of flowering was observed in G482 and G485 overexpression lines, indicating that G3436 has a related activity to those proteins. 35S::G3436 lines showed positive results in plate based abiotic stress experiments and were more tolerant of heat during germination compared to wild type. However, the results from soil drought experiments have so far been inconclusive. Data for particular lines were rather inconsistent between different runs of the experiments, suggesting that variables such as temperature, light intensity, and air-flow might influence the results.

[0841] Potential applications. Based on the results obtained so far, G3436 may be applied to effect abiotic stress tolerance, particularly to factors such as heat. The gene might also be applied to modify flowering time, and could be especially useful in circumstances where either an acceleration or induction of flowering is desired.

G3470 (SEQ ID NO: 3 and 4; Glycine max)—Constitutive 35S

[0842] Background. G3470 is an NF-YB gene from Glycine max and lies within the G481 sub-clade. The aim of this study was to assess the role of G3470 in drought stress-related tolerance via overexpression, and compare the effects with that of the other NF-Y genes.

[0843] Morphological Observations. 35S::G3470 lines exhibited a distinct delay in the onset of flowering (approximately one week under 24-hour light). Two different constructs (P21341 and P21471) were tested, and both produced similar effects on morphology. However, for unknown reasons, the penetrance of the late flowering phenotype was more apparent with P21341 than P21471. The constructs each contained cDNAs that encoded identical products, but there was a slight difference in the UTRs included in the constructs (see sequence section for details).

[0844] It should also be noted that the penetrance of the late flowering phenotype varied across lines and plant dates, suggesting that it might depend heavily on transgene expression level and/or environmental variables such as growth temperature and light intensity.

[0845] P21341 lines: Lines 301-320: 10/20 (#304, 307, 308, 309, 311, 316, 317, 318, 319, 320) displayed late flowering and exhibited slightly dark narrow leaves. The remaining lines appeared wild type.

[0846] P21471 lines: Lines 321-331: 1/11 (#327) showed delayed flowering. The rest appeared wild type.

[0847] Physiology (Plate assays) Results. 35S::G3470 lines for two different constructs (see sequence section for details) were tested in plate based physiology assays. Both constructs yield an enhanced tolerance in sodium chloride germination assays relative to controls, but P21471 lines showed enhanced tolerance in a number of additional assays, as detailed below.

[0848] P21341 lines. Seven (#302, 303, 305, 309, 310, 316, 318) often lines showed enhanced germination, relative to wild type, in NaCl germination assays. Two lines (301 and 303) showed enhanced tolerance in a heat growth assay.

[0849] P21471 Lines

[0850] 4/10 lines (324, 329, 330, and 331) showed enhanced tolerance in NaCl germination assays.

[0851] 5/10 (322, 326, 327, 330, 331) lines showed enhanced tolerance in mannitol germination assays.

[0852] 5/10 (326, 327, 329, 330, 331) lines showed enhanced tolerance in sucrose germination assays.

[0853] 4/10 lines (327, 329, 330, and 331) lines showed enhanced tolerance in ABA germination assays.

[0854] 3/10 lines (324, 326, and 330) lines showed marginally enhanced tolerance in severe dehydration assays.

[0855] Physiology (Soil Drought-Clay Pot) Summary. A number of different 35S::G3470 lines for each of two different overexpression constructs (see sequence section for details) were tested. The results from these clay pot survival assays were somewhat inconclusive. In most of the plantings, 35S::G3470 lines showed a comparable performance to controls. A single line (#326) harboring construct (P21471) showed a significantly better performance than controls in a one of two runs of a whole pot assay, but exhibited a comparable performance in the second planting. A number of other lines performed worse than wild-type in one or more repeats of the assay.

[0856] Results from a separate study, however, indicate that G3470 confers an advantage under moderate drought stress conditions. In that study, individual plants from a 35S::G3470 line were grown in individual pots under 10-hour light conditions, water was withheld, and the proportion of the plants in the population showing moderate stress symptoms was recorded on consecutive days. In that experiment, wild-type plants showed stress symptoms sooner than those of the 35S::G3470 line.

TABLE 47
35S::G3470 drought assay results:

| | | Mean | Mean | p-value for | Mean | Mean | p-value for |
|---|---|---|---|---|---|---|---|
| | Project | drought | drought score | drought score | survival for | survival for | difference in |
| Line | Type | score line | control | difference | line | control | survival |
| 326 | DPF | 1.5 | 0.60 | 0.016* | 0.25 | 0.11 | 0.0023* |
| 326 | DPF | 1.6 | 1.1 | 0.28 | 0.14 | 0.11 | 0.37 |

DPF = direct promoter fusion project
TCST = Two component super transformation project
Survival = proportion of plants in each pot that survived
Drought scale: 6 (highest score) = no stress symptoms, 0 (lowest score; most severe effect) = extreme stress symptoms
*line performed better than control (significant at P < 0.11)

[0857] Discussion. 35S::G3370 lines exhibited similar phenotypes to 35S::G481 lines when overexpressed. Evidence of delayed flowering and a darker coloration was observed among the different lines, but these phenotypes were somewhat variable and potentially condition dependent. Additionally, 35S::G3470 lines showed a better performance in a number of plate based stress assays compared to controls. Occasional lines showed a better performance than wild-type in soil drought survival screens performed in clay pots under 24-hr light. 35S::G3470 plants were also tested in a more detailed drought study, where individual plants were droughted under 10-hr photoperiodic conditions in individual pots. In that study, 35S::G3470 plants showed less severe stress symptoms than controls on consecutive days of the early-mid part of the drought time course.

[0858] It should be noted that two different constructs for G3470 were tested (P21471 and P21341, see sequence section for details). While lines for these showed similar results in the soil drought clay pot screens, there was a difference in the penetrance of phenotypes seen in the morphology and plate based assays. Lines for P21341 showed higher penetrance of the late flowering effects but a lower penetrance of “hits” in plate based assays relative to P21471. The basis of this difference is unclear at present, since the two constructs encode identical G3470 proteins. Nonetheless, there was a slight difference in the UTR sequences included in the two constructs, which might have influenced the stability of the transcript.

[0859] All in all, 35S::G3470 lines showed similar morphological and drought-related stress phenotypes to 35S::G481 lines which strongly indicates that the two proteins have comparable activities.

[0860] Potential applications. Based on the enhanced performance of 35S::G3470 lines in abiotic stress assays, this gene could be used to confer tolerance to drought related stress.

[0861] Additionally, the delayed flowering and slightly dark coloration seen in the 35S::G3470 lines indicate that the gene might also be used to modify flowering time and enhance yield. A dark coloration could be due to increased chlorophyll or chloroplast content and may be indicative of an improvement in photosynthetic capacity.

G3471 (SEQ ID NO: 5 and 6; Glycine max)—Constitutive 35S

[0862] Background. G3471 is an NF-YB gene from Glycine max. Based on sequence alignments and phylogenetic analysis, G3471 lies within the G481 sub-clade. The aim of this study was to assess the role of G3471 in drought stress-related tolerance via overexpression, and to compare the effects with those of the other NF-Y genes.

[0863] Morphological Observations. Overexpression of G3471 produced alterations in leaf shape, coloration, and flowering time relative to controls. The predominant phenotype was delayed flowering and dark narrow leaves.

[0864] Physiology (Plate assays) Results. 35S::G3471 lines were tested in plate based physiology assays. Some of these transformants were more tolerant to sucrose (3 of 24 lines), less sensitive to ABA (3 of 24 lines), and severe desiccation (7 of 24 lines) than controls.

[0865] Physiology (Soil Drought-Clay Pot) Summary. 35S::G3471 lines showed evidence of drought tolerance in these clay pot screens. Each of three independent lines performed better than wild-type in one of two plantings.

TABLE 48
35S::G3471 drought assay results.

| | | Mean | Mean | p-value for | | | p-value for |
|---|---|---|---|---|---|---|---|
| | Project | drought | drought score | drought score | Mean survival | Mean survival | difference in |
| Line | Type | score line | control | difference | for line | for control | survival |
| 341 | DPF | 2.5 | 1.9 | 0.28 | 0.38 | 0.37 | 0.90 |
| 341 | DPF | 1.7 | 1.2 | 0.32 | 0.32 | 0.19 | 0.015* |
| 344 | DPF | 0.70 | 0.60 | 0.74 | 0.17 | 0.16 | 0.75 |
| 344 | DPF | 2.2 | 1.4 | 0.059* | 0.45 | 0.22 | 0.000067* |
| 347 | DPF | 1.1 | 1.2 | 0.93 | 0.41 | 0.36 | 0.39 |
| 347 | DPF | 2.0 | 1.0 | 0.031* | 0.38 | 0.16 | 0.000081* |

DPF = direct promoter fusion project
Survival = proportion of plants in each pot that survived
Drought scale: 6 (highest score) = no stress symptoms, 0 (lowest score; most severe effect) = extreme stress symptoms
*line performed better than control (significant at P < 0.11)

[0866] Discussion. Changes in flowering time were seen among the 35S::G3471 lines. A number of lines were slightly dark, had narrow leaves, and were late flowering. This effect was similar to that obtained with 35S::G481 lines, indicating that the two proteins have similar activities.

[0867] No consistent effects were seen in plate based assays, but each of three lines showed a better performance than wild-type in one of two runs of a soil drought assay.

[0868] Potential applications. Based on the results obtained, G3471 likely has similar applications to G481; the gene may be useful in conferring tolerance to drought-related stress. G3471 might also be applied to regulate developmental traits such as flowering time.

G3472 (SEQ ID NO: 31 and 32; Glycine max)—Constitutive 35S

[0869] Background. G3472 is an NF-YB gene from Glycine max and is phylogenetically more closely related to Arabidopsis G485/G482 than G481. The aim of this study was to assess the role of G3472 in drought-related stress tolerance via overexpression, and to compare the effects with those of the other G481 homologs.

[0870] Morphological Observations. A total of forty 35S::G3472 lines were obtained in two separate batches of T1 lines. With the exception of occasional plants that were slightly early flowering and had some size variation, neither of these sets of plants showed any consistent difference in morphology to controls. Three T2 populations were also examined, but overall, there were no consistent differences in morphology to wild type controls.

[0871] Physiology (Plate assays) Results. Three of ten 35S::G3472 lines showed an improvement in NaCl tolerance on germination relative to controls. Some of the lines also were rather more vigorous, had more extensively developed root systems and more root hairs than wild-type seedlings, when grown on regular MS control plates without a stress treatment.

[0872] Discussion. Although occasional plants showed slightly early flowering, overall, 35S::G3472 lines showed no clear-cut differences in growth and development compared to wild-type controls. These plants were tested in plate based assays: a small number of the lines showed mild NaCl tolerance in a germination assay and some others exhibited more extensive root development when grown on plates. In the other treatments, though, the plants showed a wild-type response, and no obvious improvement in tolerance was seen during soil based drought assays.

[0873] This gene did not produce accelerated flowering in the same manner as did other G482/G485 related genes such as G3474, G3475 and G3476 (SEQ ID NOs: 24, 16 and 20, respectively). It is possible therefore, that G3472 has weaker activity than some of the other proteins within the clade. Based on sequence alignments, it might be possible to predict particular key residues which are essential for the protein function.

[0874] Potential applications. Based on the plate data obtained so far, G3472 may be applied to improve abiotic stress tolerance traits such as salinity tolerance, or to enhance root development.

G3474 (SEQ ID NO: 23 and 24; Glycine max)—Constitutive 35S

[0875] Background. G3474 is an NF-YB gene from Glycine max and lies within the G482/G485 sub-clade. The aim of this study was to assess the role of G3474 in drought stress-related tolerance via overexpression, and to compare the effects with those of the other G481-related genes.

[0876] Morphological Observations. Overexpression of G3474 produced a marked acceleration in the onset of flowering (1-2 weeks under 24-hour light conditions) in many of the Arabidopsis transformants.

[0877] A significant number of lines displayed no consistent differences to wild type.

[0878] Early flowering was also observed in each of three T2 populations.

[0879] Discussion. 35S::G3474 lines showed accelerated flowering by 1-2 weeks compared to wild-type. This same phenotype was also noted for the many of the genes within the G482/G485 sub-clade, indicating that those proteins have similar activities. However, when 35S::G3474 lines were tested in plate based abiotic stress assays, no consistent difference in performance relative to controls was observed, suggesting that G3474 did not have a fully equivalent activity to G482/G485.

[0880] Potential applications. Based on the results obtained so far, G3474 could be applied to modify flowering time. In particular, the gene may be used in circumstances when an acceleration or induction of flowering is desired.

G3475 (SEQ ID NO: 15 and 16; Glycine max)—Constitutive 35S

[0881] Background. G3475 is an NF-YB gene from Glycine max and lies within the G482/G485 sub-clade. The aim of this study was to assess the role of G3475 in drought stress-related tolerance via overexpression, and to compare the effects with those of the other G481-related genes.

[0882] Morphological Observations. Overexpression of G3475 produced a very marked acceleration in the onset of flowering in Arabidopsis (approximately 1-2 weeks under 24-hour light conditions). Many of these plants also displayed a reduction in vegetative biomass compared to wild type.

[0883] Physiology results. Four of ten 35S::G3475 lines were more tolerant to cold than wild-type seedlings in a plate-based cold growth assay.

[0884] Discussion. 35S::G3475 lines showed accelerated flowering by ˜1-2 weeks compared to wild-type. This same phenotype was also noted for many of the genes within the G482/G485 sub-clade, indicating that those proteins have similar activities. When 35S::G3475 lines were tested in plate based abiotic stress assays, four of 10 lines showed enhanced tolerance in the cold growth assay relative to controls.

[0885] Potential applications. Based on the results obtained so far, G3475 could be applied to modify flowering time. In particular, the gene may be used in circumstances when an acceleration or induction of flowering is desired. The gene might also have a utility in conferring tolerance to abiotic stress; in particular to cold conditions.

G3476 (SEQ ID NO: 19 and 20; Glycine max)—Constitutive 35S

[0886] Background. G3476 is an NF-YB gene from Glycine max and lies within the G482/G485 sub-clade. The aim of this study was to assess the role of G3476 in drought stress-related tolerance via overexpression, and to compare the effects with those of the other G481-related genes.

[0887] Morphological Observations. Overexpression of G3476 produced an acceleration in the onset of flowering in Arabidopsis (by up to approximately 1 week under 24-hour light). These effects, however, were rather inconsistent between different batches of T1 plants, and a considerable number of plants showed no consistent differences to controls.

[0888] No alterations in flowering time were noted in three different T2 populations that were examined.

[0889] Physiology (Plate assays) Results. Three out of ten 35S::G3476 lines were more tolerant to cold in a germination assay. Three lines were also more tolerant to dehydration stress in a severe plate based drought assay.

[0890] Physiology (Soil Drought-Clay Pot) Summary. Two lines of 35S::G3476 transformants performed significantly better than wild-type in soil drought assays in at least one planting.

TABLE 49
35S::G3476 drought assay results:

| | | | Mean | | | | |
|---|---|---|---|---|---|---|---|
| | | Mean | drought | p-value for | Mean | Mean | |
| | Project | drought | score | drought score | survival for | survival for | p-value for difference |
| Line | Type | score line | control | difference | line | control | in survival |
| 309 | DPF | 1.3 | 0.60 | 0.12 | 0.24 | 0.13 | 0.022* |
| 309 | DPF | 2.9 | 0.80 | 0.00014* | 0.58 | 0.11 | 0.000000000014* |
| 321 | DPF | 1.2 | 0.40 | 0.026* | 0.24 | 0.079 | 0.00055* |
| 321 | DPF | 0.30 | 0.40 | 0.68 | 0.064 | 0.060 | 0.83 |

DPF = direct promoter fusion project
TCST = Two component super transformation project
Survival = proportion of plants in each pot that survived
Drought scale: 6 (highest score) = no stress symptoms, 0 (lowest score; most severe effect) = extreme stress symptoms
*line performed better than control (significant at P < 0.11)

[0891] Discussion. 35S::G3476 lines showed accelerated flowering by 1 week compared to wild-type. However, this effect was of variable penetrance between lines and plantings suggesting that it might be dependent on a specific range of transgene expression and/or growth conditions. It should be noted that many of the genes within the G482/G485 sub-clade produced early flowering when overexpressed, indicating that those proteins have similar activities. 35S::G3476 lines showed encouraging results in abiotic stress assays.

[0892] Potential applications. Based on the results obtained, G3476 could be applied to effect tolerance to abiotic stresses such as drought and cold conditions. The gene might also have a utility in modification of flowering time.

G3478 (SEQ ID NO: 25 and 26; Glycine max)—Constitutive 35S

[0893] Background. G3478 is an NF-YB gene from Glycine max and lies within the G482/G485 sub-clade. The aim of this study was to assess the role of G3478 in drought stress-related tolerance via overexpression, and compare the effects with those of the other G481-related genes.

[0894] Morphological Observations. Overexpression of G3478 accelerated the onset of flowering in Arabidopsis. The transformants tended to have spindly stems.

[0895] Discussion. 35S::G3478 lines showed accelerated flowering time, by 1-2 weeks and were slightly small compared to wild-type. The same flowering phenotype was also noted for the many of the genes within the G482/G485 sub-clade, indicating that these proteins have similar activities.

[0896] Potential applications. Based on the results obtained so far, G3478 could be applied to modify flowering time. In particular, the gene may be used in circumstances when an acceleration or induction of flowering is desired.

G3876 (SEQ ID NO: 7 and 8; Oryza sativa)—Constitutive 35S

[0897] Background. G3876 is a maize gene which is a member of the HAP3 (NF-YB) subfamily of the CCAAT-box binding transcription factors. In phylogenetic analyses, the protein lies within the same sub-clade as G481.

[0898] Morphological Observations. Two sets of 35S::G3876 lines have been selected. No clear-cut alterations in morphology were noted, although a few of the lines were noted to have slight changes in flowering time. Line 302 was slightly late flowering, whereas #305 and #311 were slightly early flowering. Fifteen other lines appeared wild type in morphology and development.

[0899] Physiology (Plate assays) Results. Six of 10 lines tested were more tolerant to cold during germination than wild type, and 4 of 10 lines were more tolerant to desiccation in plate-based assays.

[0900] Discussion. A minority of 35S::G3876 lines showed slight alterations in flowering time. Perhaps more significantly, improvements in cold germination and desiccation tolerance were noted in plants that had wild-type development and morphology.

[0901] Potential applications. Based on the results obtained so far, G3876 could be applied to modify flowering time. The gene may also be used to improve drought and cold tolerance without causing undesirable morphological or developmental defects.

G481 (SEQ ID NO: 1 and 2; Arabidopsis thaliana)—Double Overexpression

[0902] Background. The aim of this double overexpression approach was to determine whether different leads gave an additive effect on drought/disease/low N tolerance when “stacked” together in the same line. A crossing strategy was initiated to construct the lines listed below.

[0903] Morphological Observations.

[0904] (1) 35S::G481×35S::G1073 (SEQ ID NO: 113)

[0905] A doubly homozygous line has been obtained. These plants showed an additive phenotype compared to the two parental lines. The double overexpressors tended to be late flowering, had larger rosettes than controls (particularly at late stages of growth), with somewhat enlarged and curled leaves. These plants also tended to be darker green than controls.

[0906] (2) 35S::G481×35S::G867 (SEQ ID NO: 87)

[0907] The F1 plants from this cross were dark in coloration, showed narrow leaves, and were distinctly late flowering. Such phenotypes were perhaps stronger than those seen in the 35S::G481 parental line.

[0908] (3) 35S::G481×35S::G682 (SEQ ID NO: 59)

[0909] These plants showed an additive phenotype between G682 and G481 overexpression and were small at early stages, glabrous and late flowering.

[0910] (4) 35S::G481×35S::G489 (SEQ ID NO: 45)

[0911] The double overexpression line showed a comparable phenotype to the 35S::G481 parental line: the plants were late flowering, dark in coloration, and had rather narrow leaves.

[0912] (5) 35S::G481×35S::G1792 (SEQ ID NO: 221)

[0913] These F1 plants showed a wild-type phenotype, and unexpectedly, did not show a delay in flowering.

[0914] (6) 35S::G481 (female)×35S::G3086 (SEQ ID NO: 291)(male)

[0915] Twenty F1 plants were obtained. All showed an identical phenotype to the 35S::G3086 parental line: very early flowering, reduced size, and spindly inflorescences.

[0916] Physiology (Plate assays) Results. Six out of ten double overexpressing lines for 35S::G1073 supertransformed into a 35S::G481 line were more tolerant to cold conditions in a plate-based germination assay. Four lines also performed better than control seedlings in a root growth assay under low N.

[0917] Physiology (Soil Drought-Clay Pot) Summary. 35S::G481×35S::G489 and 35S::G481×35S::G1073 lines were more drought tolerant than controls in clay pot screens.

TABLE 50
35S::G481 X 35S::G489 drought assay results

| | | Mean | Mean | p-value for | Mean | Mean | p-value for |
|---|---|---|---|---|---|---|---|
| | | drought | drought score | drought score | survival | survival | difference in |
| Line | Project Type | score line | control | difference | for line | for control | survival |
| F1-16-8 | G481 x G489 | 2.6 | 2.0 | 0.053* | 0.46 | 0.31 | 0.0081* |
| | Double OEX | | | | | | |
| F1-16-8 | G481 x G489 | 2.6 | 2.0 | 0.26 | 0.49 | 0.36 | 0.030* |
| | Double OEX | | | | | | |
| F1-1-46 | G481 x G1073 | 3.4 | 2.3 | 0.021* | 0.57 | 0.36 | 0.00070* |
| | Double OEX | | | | | | |
| F1-1-46 | G481 x G1073 | 2.4 | 1.8 | 0.10* | 0.57 | 0.31 | 0.000011* |
| | Double OEX | | | | | | |

Double OEX = double overexpression resulting from crossing of two homozygous lines
Survival = proportion of plants in each pot that survived
Drought scale: 6 (highest score) = no stress symptoms, 0 (lowest score; most severe effect) = extreme stress symptoms
*line performed better than control (significant at P < 0.11)

[0918] Discussion: A crossing strategy was initiated to construct these lines; details of progress are shown in the morphology section. Double homozygous lines have been obtained between 35S::G481 and 35S::G682, 35S::G1073 and 35S::G489.

[0919] The 35S::G481;35S::G1073 double overexpression line has also been examined in a single pot soil drought assay at well-watered, mild drought, and moderate drought states for a variety of physiological parameters. Based on HPLC measurements, the double showed higher chlorophyll and carotenoid levels at the two drought states than wild-type. A significantly higher level of proline was also seen in the 35S::G481;35S::G1073 line versus wild-type at both drought states. A higher level of ABA versus wild-type was also apparent at a mild-drought state.

[0920] The 35S::G481×35S::G3086 combination produced an interesting morphological phenotype. F1 plants have recently been obtained, and these all showed a 35S::G3086-like morphology; the plants were very early flowering.

[0921] Potential applications: The 35S::G481;35S::G489 combination may be used to confer drought tolerance in plants.

[0922] The 35S::G481;35S::G3086 combination might have an application in soybean. 35S::G481 in soybean produced a delayed flowering off-type that is associated with a yield penalty. Combining G481 with G3086 overexpression in the same soy line may afford drought tolerance without the delayed flowering caused by G481 alone.

### The G682 Clade

[0923] G682 (SEQ ID NO: 59 and 60; Arabidopsis thaliana)—Constitutive 35S

[0924] Background. G682 was selected for the drought program based on the enhanced tolerance of 35S::G682 lines to drought-related stresses such as heat. A genetic analysis of G682 function has not yet been published, but its sequence (AX366159) has been included in patent application WO0208411.

[0925] Previously, we observed that G682 overexpression produced enhanced tolerance heat during germination. The aim of this study was to re-assess a greater number of 35S::G682 lines and to allow comparison of the G682 overexpression effects to those of its paralogs and orthologs. We also sought to test whether use of a two-component overexpression system would produce any strengthening of the phenotype relative to the use of a 35S direct promoter-fusion. The effects of three different clones were tested in the two-component system: two distinct cDNA clones and a genomic clone.

[0926] Two additional sets of direct promoter fusion lines were also examined in this study. One set contained a genomic clone of G682 in the kojak background. The other set contained the same genomic clone in a wild-type background. The kojak mutant produces only vestigial root hairs, and thus the purpose of overexpressing G682 in this background was to test whether the effects of G682 were dependent on increased root hairs.

[0927] Morphological Observations. Overexpression of G682 produced a spectrum of effects on Arabidopsis morphology including a glabrous phenotype, reduced pigmentation levels, alterations in flowering time, and increases in root hair density. Most of plants were reduced in size.

[0928] Two component lines exhibited a comparable glabrous phenotype to the G682 overexpression lines using a 35S direct promoter fusion construct.

[0929] The glabrous effects were highly penetrant: 16/20 T1 plants were completely glabrous, 3/20 T1 plants were partially glabrous (305, 306, 309) and 1/20 (#319) showed a wild-type trichome density. It should be noted that a number of lines #301, 304, 311, 315, 316, 318 were also observed to be smaller than wild type. No difference in coloration compared to wild-type was noted in the seed from this set of plants.

[0930] Trichome distribution on lines 301-316 were examined once again in the T2 generation: from lines 305, 306, 309 again were partially glabrous, while plants from all the other lines were completely glabrous.

[0931] Three lines were examined again in the T3 generation: T3-306 showed a partial glabrous phenotype and was slightly early flowering. Lines T3-307 and T3-310 exhibited a completely glabrous phenotype (of the lines submitted for physiological assays, the following showed a segregation on selection plates in the T2 generation that was compatible with the transgene being present at a single locus: 301, 302, 306, 308, 309, 310, 312, and 314. Lines 305 and 307 showed segregation that was compatible with insertions at multiple loci.).

[0932] Lines 2061-2070 (contained P23516, a cDNA variant clone of G682, see sequence section for details):

[0933] All were slightly small, 1/10 died at early stages, 3/10 were completely glabrous (#2063, 2069, 2070), 3/10 (2061, 2062, 2067) were partially glabrous and 3/10 (#2064, 2065, 2066) appeared wild type.

[0934] Lines 2081-2092 (contained P23517, a G682 cDNA clone, see sequence section for details):

[0935] All slightly small at early stages. 2/12 (#2085, 2092) were partially glabrous, 1/12 (#2089) appeared wild type. Remaining 8/12 plants were completely glabrous.

[0936] The higher frequency glabrous phenotype obtained with the lines containing P23517 suggests that the G682 protein encoded by that cDNA might be more potent than the one encoded by P23516.

[0937] Direct promoter-fusion lines, as compared to controls

[0938] Two new sets of 35S::G682 direct promoter fusion lines have recently been obtained, containing our original genomic clone P108. Lines 1761-1780 were derived from transformation of that construct into a kojak mutant background, whereas the lines 1781-1800 were derived from transformation into a wild-type Columbia background.

[0939] Lines 1761-1780 (contained a genomic clone of G682 in the kojak background):

[0940] At early stages, all were pale and glabrous. Later, 2/20 plants appeared wild type (#1777, 1778) whereas the others showed a glabrous or partial glabrous phenotype. Most of plants were reduced in size. A number of lines were early flowering: 1768, 1771, 1779 were very early, whereas #1761-1764, 1773-1775 were slightly early flowering. No difference in coloration compared to wild-type was noted in the seed from this set of plants.

[0941] Kojak is a mutant in the cellulose synthase like gene CSLD3 (At3g03050) which produces only vestigial root hairs. The aim of this experiment was to test whether the 35S::G682 enhanced stress resistance phenotype was dependent on increased root hair density. The intention was that we would be able to test the effects of G682 in the absence of an ability to produce root hairs. Very surprisingly, however, the 35S::G682 phenotype was epistatic to the kojak mutation (see physiology plate results) and the 35S::G682;kojak lines exhibited root hairs. Such as result suggests that G682 overexpression compensated for the kojak defect.

[0942] Lines 1781-1800 (contained a genomic clone of G682) in the wild type Background.

[0943] At early stages, all were pale and glabrous. Later, 19/20 were either glabrous or partial glabrous (#1789 appeared wild type). All others were glabrous and slightly small. Some plants (particularly #1791) flowered early. A number of the lines were rather slow developing versus wild-type: 1784-1787, 1795, and 1796. No difference in coloration compared to wild-type was noted in the seed from this set of plants.

[0944] Epidermal patterning in 35S::G682, Line 16: To preliminarily determine if G682 overexpression caused changes in stomatal density, we observed epidermal peels of 35S::G682 (line 16) and controls, less than one week after bolting began. Epidermal density was equivalent in mature rosette leaves (both abaxial and adaxial surfaces) and in the inflorescence stem. On the abaxial (lower) side of expanding cauline leaves, however, epidermal density was somewhat greater in wild-type plants (G682 OE plants had approximately one-third less stomata per unit area).

[0945] Physiology (Plate assays) Results. We previously observed that G682 overexpressors were more tolerant to heat during germination. The plants were glabrous with tufts of increased root hair density compared to wild type.

[0946] Enhanced abiotic stress tolerance has now been confirmed using ten 2-component 35S::G682 lines (301 to 314). All ten lines showed increased tolerance to sucrose on germination and also were more tolerant than wild type to varying extents in at least one or more of the following germination assays: sodium chloride, mannitol, heat, and ABA. Nine of the lines also showed a marked increase in root hair density and were glabrous. 35S::G682 lines performed better in the C:N sensing and growth under low nitrogen assays.

[0947] In contrast, 35S::G682 direct promoter fusion lines (1781 to 1798) had less dramatic phenotypes. In most stress assays, no increased tolerance was observed., Some lines did show an increase in root hair density and performed better in the C:N-sensing and growth-under-low-nitrogen assays. The difference in the phenotypes between the two-component and direct-promoter-fusion lines probably reflects greater expression in the two-component lines.

[0948] 35S::G682 seedlings in the kojak background (lines 1761 to 1780) were also analyzed in physiological assays in an attempt to see how important the presence of root hairs are for the stress tolerance phenotypes observed with G682 overexpression. 35S::G682 seedlings in a kojak background performed well in a C:N sensing assay. Two of these ten lines performed well in a root growth assay under low nitrogen; the seedlings were more vigorous and had more extensively developed roots than controls. Some of the plants also did well in heat germination and heat growth assays.

[0949] As noted in the morphology section, the overexpression of G682 rescued the vestigial-root phenotype of the kojak mutant. This rescue was not fully penetrant. The rescue of the kojak phenotype precluded our attempt to determine the degree to which root hairs are necessary for the stress resistance phenotypes seen in G682 OE lines.

[0950] Discussion. 35S::G682 two-component lines showed a strong glabrous phenotype, similar to what was observed during our initial genomics program. Additionally, a number of the lines were noted to be smaller than controls, an effect that had not been previously recognized.

[0951] A high penetrance of the glabrous phenotype was seen with one of the cDNA variant clones (P23517), and with the G682 genomic clone. The other cDNA clone (P23516) had lower penetrance. 35S::G682 two component lines were typically smaller than wild-type.

[0952] Surprisingly, over-expression of G682 in the kojak background rescued the phenotype of the mutant. The rescue of the kojak phenotype by G682 overexpression precluded our attempts to determine the importance of root hairs in the stress tolerance phenotypes conferred by G682.

[0953] Direct promoter fusion lines had weaker phenotypes compared to the two-component lines. The most striking differences between the direct fusion lines and the two-component lines were seen in the NaCl germination assay, and in the sucrose germination assay where the two-component lines gave significant stress tolerance. The direct fusion lines did not show increased tolerance in these assays.

[0954] The performance of 35S::G682 two-component lines in the clay-pot soil drought assay was outstanding, as they consistently performed better than wild-type controls. All three two-component lines tested showed increased survivability in two separate experiments. Direct fusion lines also showed some evidence of drought tolerance, but this was less marked than with the two-component lines.

[0955] Thus, we have obtained substantially stronger phenotypes with 35S::G682 two-component lines than direct fusion lines. This might be attributable to higher levels of G682 expression in the former.

[0956] Three independent 35S::G682 lines (a pair of direct fusion and a two-component line) were tested in “single pot” soil drought assays, in which a number of different physiological parameters were measured. A general reduction in chlorophyll levels was noted, and in some cases, a reduction in the rate of photosynthesis was seen. These parameters correlate with the fact that 35S::G682 lines were markedly dwarfed and rather yellow in coloration. It should also be noted that many of the plants in these experiments were too small to used for physiological measurements.

[0957] Potential applications. The results of these overexpression studies confirm that G682 is an excellent candidate gene to modify trichome or root hair development, and for improvement of drought-related stress or nutrient limitation tolerance in plants. However, the slight decrease in size seen in some of the lines, suggests that the gene might require optimization by use of different promoters or protein modifications, prior to product development.

G682 (SEQ ID NO: 59 and 60; Arabidopsis thaliana)—Vascular SUC2

[0958] Background. The aim of this project was to determine whether expression of G682 from a SUC2 promoter, which predominantly drives expression in a vascular pattern, was sufficient to confer stress tolerance that is similar to, or better than, that seen in 35S::G682 lines.

[0959] Additionally, this study allowed us to assess whether use of an alternative promoter could eliminate some of the undesirable size reductions that are associated with G682 overexpression (see 35S::G682 report), while still conferring enhanced stress tolerance.

[0960] Morphological Observations. For plants transformed with P21525, which contains a SUC2::G682 direct promoter-fusion, changes in trichome distribution were apparent in 8/12 T1 plants. These individuals all exhibited a partial glabrous phenotype in which trichomes were absent from the central portions of the leaves nearest the mid-vein, but became present towards the leaf margins. Some slight variation in flowering time was also noted in this population, but in other respects, the lines were of a wild-type size and morphology.

[0961] Three lines were examined in the T2 generation. All of these populations showed a partial glabrous phenotype comparable to that seen in the T1 generation. One line also showed accelerated flowering. Plants from each of the populations were noted to slightly small.

[0962] Initially, three sets of 2-component lines were obtained for which an opLexA::G682 construct was supertransformed into a SUC2::LexA-GAL4TA promoter driver line. Considerable size variation was apparent among these plants in the T1 generation, but no effects on trichome development were noted. However, the GFP reporter in these supertransformants indicated that activity from the SUC2 promoter was becoming silenced in subsequent generations. The lines were therefore not submitted for physiological assays.

[0963] Later we obtained 2-component lines in an alternative SUC2 promoter line created by supertransformation with two different opLexA::G682 constructs (P23517 and P23516). In this line the GFP reporter indicated that the SUC2::LexA driver was active, but none of the resulting lines produced alterations in trichome distribution. However, some of the lines did show effects on flowering time. Both P23517 and P23516 were functional and produced a glabrous phenotype when supertransformed into a 35S driver line, see 35S::G682 results, above.

[0964] At present the basis of the difference in results obtained between the one and two component SUC2::G682 lines is unclear, but it could indicate that a particular range of expression is needed to produce the glabrous effects.

[0965] Physiology (Plate assays) Results. Six of ten SUC2::G682 direct promoter fusion lines were larger than control seedlings in a heat germination assay. Three lines also did well in a heat growth assay. These seedlings also were somewhat larger and more vigorous on control plates in the absence of a stress treatment. In the other assays, the plants were not significantly different from wild-type.

[0966] A set of ten two-component lines were tested later. Three of these lines showed a weak positive result in a chilling growth assay, but in the other assays, a wild-type response was obtained.

[0967] Interestingly, SUC2::G682 lines did not show consistently better results than controls in the N assays, indicating that a vascular specific pattern of expression was not sufficient to confer tolerance to such conditions. The SUC2::G682 lines were also not noted to have any increase in root hair density

[0968] Physiology (Soil Drought—Clay Pot) Summary. Three independent SUC2::G682 lines were tested in soil drought assays. One line (#1542) showed significantly better survival than controls on two of three plant dates. This line showed a wild-type performance when tested on a third plant date.

TABLE 51
SUC2::G682 drought assay results:

| | | Mean | Mean | p-value for | Mean | Mean | p-value for |
|---|---|---|---|---|---|---|---|
| | Project | drought | drought score | drought score | survival for | survival for | difference in |
| Line | Type | score line | control | difference | line | control | survival |
| 1542 | DPF | 3.2 | 1.6 | 0.0012* | 0.48 | 0.24 | 0.000031* |
| 1542 | DPF | 0.60 | 0.20 | 0.16 | 0.14 | 0.050 | 0.012* |
| 1542 | DPF | 1.0 | 0.90 | 0.77 | 0.22 | 0.20 | 0.74 |

DPF = direct promoter fusion project
Survival = proportion of plants in each pot that survived
Drought scale: 6 (highest score) = no stress symptoms, 0 (lowest score; most severe effect) = extreme stress symptoms
*line performed better than control (significant at P < 0.11)

[0969] Discussion. SUC2::G682 lines containing a direct promoter-fusion construct have been established, as well as SUC2::G682 two component lines. A partial glabrous phenotype was observed in the majority of the direct promoter-fusion lines: leaves of SUC2::G682 plants were generally devoid of trichomes in the central region nearest the mid-vein, but developed those structures towards the margins of the leaves. We have previously established that G682 acts to repress trichome formation and the above trichome distribution correlated well with the expression pattern produced by the SUC2 promoter. G682 protein (or signaling molecules associated with its activity) would likely have been present at the highest levels near the mid-vein of leaves and could have moved from those regions to inhibit trichome specification in the adjacent epidermal tissue. In other respects, SUC2::G682 direct promoter-fusion plants were morphologically wild type. Some size reduction was observed in the SUC2::G682 T2 generation plants, but this was rather less marked than that seen in 35S::G682 lines.

[0970] Two-component lines, surprisingly, did not show a glabrous phenotype. Two different promoter background lines, and three different opLexA::G682 constructs were used. It is worth noting that the opLexA::G682 constructs used in this study produced glabrous phenotypes in combination with a 35S::LexA-GAI4IA construct. (see 35S::G682 section). It is currently unclear why the two component SUC2 lines did not produce a partial glabrous phenotype.

[0971] Two-component lines were not tested in soil assays. These lines were subjected to plate based assays, but showed a wild-type response, apart from a weak positive result in a chilling assay.

[0972] Potential applications. Overexpression studies indicate that G682 is an excellent candidate for improvement of drought related stress tolerance in commercial species. The results of this SUC2 experiment indicate that G682 can confer some stress tolerance when expressed under the control of a vascular promoter. Although the tolerance seen was less compelling than in 35S lines, dwarfing off-types seen in 35S::G682 lines were less apparent in the SUC2::G682 lines. Thus, a vascular expression pattern may be useful for optimization of this polynucleotide in crops.

G682 (SEQ ID NO: 59 and 60; Arabidopsis thaliana)—Epidermal CUT1

[0973] Background. The aim of this project was to determine whether expression of G682 from a CUT1 promoter (which predominantly drives expression in the shoot epidermis, and results in high level expression in guard cells), was sufficient to confer stress tolerance that is similar to, or better than, that seen in 35S::G682 lines.

[0974] Additionally this study allowed us to assess whether use of an alternative promoter could eliminate some of the undesirable size reductions that are associated with G682 overexpression (see 35S::G682 report), while still conferring enhanced stress tolerance.

[0975] Morphological Observations. Arabidopsis lines in which G682 was expressed from the CUT1 promoter (using the two component system) exhibited no consistent differences in growth and development compared to controls. Two batches of CUT1::G682 lines were obtained; some size variation was observed among the T1 plants, but overall, their morphology appeared wild type. Three T2 populations were also examined and exhibited wild-type morphology.

[0976] Physiology (Plate assays) Results. Six out of ten CUT1::G682 lines were more tolerant to NaCl than wild type in a germination assay. One line was substantially more tolerant to cold than controls in a germination assay.

[0977] Physiology (Soil Drought-Clay Pot) Summary. Three of eight CUT1::G682 lines tested were more tolerant to drought in a soil based drought assay than controls.

[0978] Discussion. We have produced CUT1::G682 lines using the two component system. These lines showed no consistent differences to wild-type and interestingly, did not show a glabrous phenotype. This could indicate either that CUT1 did not produce high enough levels of G682 activity in the epidermis to repress trichome initiation, or that activity of G682 is required in sub-epidermal layers to cause that effect.

[0979] CUT1::G682 lines have now been subjected to plate based physiology assays. Six of ten lines tested produced a moderate enhancement of tolerance to sodium chloride on germination plates. Although this was a somewhat weaker phenotype than that shown by 35S::G682 lines, it was of interest since the CUT1 promoter does not drive significant expression in the root, and the CUT1::G682 lines were not observed to show any increase in root hair density. Therefore, the stress resistance phenotype of plants with increased G682 activity is separable from changes in root hair number. The increased NaCl stress tolerance seen in CUT1::G682 lines appears to have arisen from increased levels of G682 in the shoot epidermis. However, there is the possibility that G682 protein, or signals associated with its activity, were able to move from the epidermal cell layer to other regions of the shoot.

[0980] In clay-pot soil assays, one line of CUT1::G682 overexpressors showed statistically significant drought tolerance relative to wild-type controls.

[0981] Potential application. Overexpression studies indicate that G682 is an excellent candidate for improvement of drought related stress tolerance in commercial species. The results of this CUT1 experiment indicate that G682 can confer some drought-related stress tolerance independently of an increase in root hair density; thus the gene could be applicable to plant species in which the roots already differentiate a maximum number of root hairs.

G682 (SEQ ID NO: 59 and 60; Arabidopsis thaliana)—Epidermal LTP1

[0982] The aim of this project was to determine whether expression of G682 from a LTP1 promoter (which predominantly drives expression in the shoot epidermis, and results in particularly high levels of expression in trichomes), was sufficient to confer stress tolerance that is similar to, or better than, that seen in 35S::G682 lines.

[0983] Additionally this study allowed us to assess whether use of the LTP1 promoter could eliminate the undesirable size reduction associated with G682 overexpression, while still conferring enhanced stress tolerance.

[0984] Morphological Observations. Two sets of lines were obtained in which G682 was expressed from the LTP1 promoter. Lines 1721-1736 contained a direct fusion construct (P23328): many of these lines showed a glabrous phenotype comparable to that seen in 35S::G682 lines. Additionally, most of the lines were slightly small compared to wild type. Of 16 lines obtained, 8/16 were totally glabrous. Two of 16 lines were partially glabrous. The remaining T1 plants appeared wild type. Three lines were examined in the T2 generation. Two lines were small and glabrous, whereas the one population were partially glabrous.

[0985] A set of LTP1::G682 2-component lines were subsequently obtained. Surprisingly, none of these lines exhibited a glabrous phenotype. The basis for this difference is not clear, but it should be noted that the opLexA::G682 construct (P23517) was transformed into a 35S driver line, and the majority of lines were glabrous. It is possible that there is an optimum range of expression needed to generate glabrous effects with LTP1 and that this was only obtained with the direct fusion arrangement.

[0986] Physiology (Plate assays) Results. Three out of ten LTP1::G682 lines performed better than controls in the C:N sensing and growth under low nitrogen assays. Seedlings were also glabrous and were somewhat larger. The greater tolerance of 6 of 10 lines tested relative to controls seen in the growth assay under chilling conditions might reflect the somewhat larger size and lack of anthocyanin production in LTP1::G682 plants.

[0987] Discussion. We have produced both LTP1::G682 direct promoter-fusion, and LTP1::G682 two-component lines. Surprisingly, the direct promoter-fusion lines were typically glabrous, whereas the two-component lines were not. The opLexA::G682 construct used in this study produced a glabrous phenotype in combination with a 35S::LexA-GAL4TA construct (see 35S::G682 section).

[0988] Ten of the LTP1::G682 direct promoter-fusion lines have been subjected to plate based physiology assays. Three out of the ten lines performed better in the C:N sensing and growth-under-low-nitrogen assays. For unknown reasons, in clay-pot soil drought assays, LTP1::G682 lines performed significantly worse than wild-type.

[0989] Potential applications. The results of this LTP1 experiment indicate that G682 can confer some stress tolerance independently of an increase in root hair density; thus the gene could be applicable to plant species in which the roots already differentiate a maximum number of root hairs. Soil-drought assays, however, indicate that LTP1::G682 is not an optimal combination for conferring drought tolerance in soil-grown plants.

G682 (SEQ ID NO: 59 and 60; Arabidopsis thaliana)—Super Activation (N-GAL4-TA)

[0990] Background. G682 was included in the drought program based on the increased tolerance of 35S::G682 lines to drought-related stresses. The aim of this project was to determine whether the efficacy of the G682 protein could be improved by addition of an artificial GAL4 activation domain.

[0991] Morphological Observations. Lines containing a 35S::GAL4-G682 construct exhibited no consistent differences in morphology to wild type controls. Some size variation was noted, though, among two batches of T1 lines. Interestingly, no evidence of a glabrous phenotype was evident. Transformants were obtained at rather a low frequency, with only twelve T1 lines being obtained from two selection attempts.

[0992] Physiology (Plate assays) Results. Five of eight 35S::GAL4-G682 lines were more tolerant than wild-type control seedlings in severe desiccation stress assays. Three of ten lines also performed marginally better than controls in a low N growth assay on the basis of having lower levels of anthocyanins.

[0993] Discussion. We have now isolated transformants that overexpress a version of the G682 protein that has a GAL4 activation domain fused to the N terminus. Transformants did not show a glabrous phenotype. Thus, with an added GAL4 domain, the G682 product no longer behaved as a repressor of trichome development.

[0994] In plate-based physiological assays, three often 35S::G682-GAL4 lines performed better than wild-type in a low-nitrogen root growth assay and five of ten were more tolerant in a dehydration assay. These results were less dramatic than those seen with 35S::G682.

[0995] Potential applications. 35S::G682-N-GAL4 lines may be used to confer drought-related tolerance or low nutrient tolerance to commercially-important plant species.

G682 (SEQ ID NO: 59 and 60; Arabidopsis thaliana)—Super Activation (C-GAL4-TA)

[0996] Background. The aim of this project was to determine whether the efficacy of the G682 protein could be improved by addition of an non-native GAL4 activation domain.

[0997] Morphological Observations. Overexpression of a “super-active” form of G682, comprising a GAL4 transactivation domain fused to the C terminus of the protein, produced a reduction in trichome density.

[0998] A total of seventeen 35S::G682-GAL4 T1 lines were obtained; one of these lines was completely glabrous, whereas the others were partially glabrous to varying extents. Three T2 lines were also examined and these also showed a partial glabrous phenotype.

[0999] Physiology (Plate assays) Results. 35S::G682-GAL4 lines were glabrous and had reduced anthocyanin levels. Five lines performed better in the C:N sensing and/or growth under low nitrogen assays.

[1000] Discussion. We have now isolated transformants that overexpress a version of the G682 protein that has a GAL4 activation domain fused to the C terminus. These lines all showed a reduction in trichome density, but the majority exhibited a partial, rather than a fully glabrous phenotype. Such effects were generally weaker than those shown by 35S::G682 transformants, where the majority of lines were completely glabrous. Thus, with an added GAL4 domain, the G682 product still behaved as a repressor of trichome development, but was less efficient than the wild-type version of the protein.

[1001] In plate-based physiological assays, a number of 35S::G682-GAL4 lines performed better than wild-type in low-nitrogen assays, but the results were less dramatic than those seen with 35S::G682. No clear-cut effects on root hair distribution were observed and no consistent effects were obtained in soil drought assays. These data indicate that the GAL4 domain reduces the activity of the G682 protein.

[1002] Potential applications. 35S::G682-C-GAL4 lines may be used to confer tolerance in low nutrient conditions to commercially-important plant species.

G682 (SEQ ID NO: 59 and 60; Arabidopsis thaliana)—RNAi (GS)

[1003] Background. The aim of this project was to farther refine our understanding of G682 function by use of an RNAi approach; a construct (P21111) was generated that was specifically targeted towards reducing G682 activity but not the activity of its paralogs (Table 18).

[1004] Morphological Observations. Sixteen T1 lines harboring the G682 RNAi (GS) construct P21111 were obtained. Three of these lines exhibited a moderate delay in the onset of flowering compared to wild-type controls (approximately 1 week late under 24 hour light). A fourth line showed a more subtle delay in the onset of flowering. The remaining twelve T1 plants appeared wild type at all developmental stages. Three T2 lines were also examined; plants from these populations showed no consistent differences in morphology to controls.

[1005] Physiology (Plate assays) Results. Eight of ten lines harboring a G682 RNAi (GS) construct were more tolerant than wild-type controls to sodium chloride in a germination assay. Five lines were more tolerant to sucrose than controls. Five lines were also less sensitive to ABA in a germination assay. Interesting, a similar insensitivity to ABA was noted in the KO.G682 lines and RNAi (clade) constructs. A total of three different lines were substantially more tolerant to heat than controls in germination or growth assays.

[1006] Discussion. We have isolated lines harboring a G682 specific RNAi construct. About 25% of T1 lines showed a mild delay in the onset of flowering, suggesting that the gene might promote the floral transition. However, a late-flowering phenotype was not evident in the T2 generation. With the exception of the late-flowering phenotype, these lines were wild-type.

[1007] Surprisingly, some of the lines showed more tolerance to NaCl and less sensitivity to ABA than controls in plate-based abiotic stress assays. The latter result is of interest since a G682 KO line also gave a positive result in ABA assays. In an initial run of a soil drought assay, though, G682 RNAi (GS) lines showed a wild-type performance.

[1008] Potential applications. The plate based results indicate that a knock-down approach with G682 may be used to afford stress tolerance. This is perhaps paradoxical, but it is possible that endogenous levels of G682 negatively regulate some genes which confer a benefit under stress conditions. An example of such an effect has recently been noted for a mutant of CBF2 (Novillo et al., 2004).

G682 (SEQ ID NO: 59 and 60; Arabidopsis thaliana)—RNAi (clade)

[1009] Background. The aim of this project was to further refine our understanding of G682 function by use of an RNAi approach; a construct (see sequence section) was generated that was targeted towards reducing activity of all members of the G682 clade. Given that the different members of the G682 clade potentially share some functional redundancy, it was thought that this method could reveal phenotypes that might not be visible in single KO lines for the individual clade members.

[1010] Morphological Observations. A total of twenty-three G682 RNAi (clade) lines were obtained. The majority of lines showed no consistent effects on morphology or development.

[1011] Four T1 lines were larger, developmentally more advanced, and showed upright leaves at the mid-rosette stage. Such phenotypes were not apparent in a second set of T1 lines. All plants from one T2 population and occasional plants from another T2 population were slightly larger than controls at the mid-rosette stage. The remainder of the T2 populations examined appeared wild type.

[1012] Physiology (Plate assays) Results. Five of ten lines harboring a G682 RNAi (clade) construct were tolerant to ABA in a germination assay. Some of these lines also were more tolerant in the cold growth (2/10 lines) and severe dehydration assays (2/10 lines) than wild-type controls.

[1013] Interestingly, a similar insensitivity to ABA was noted in the KO.G682 lines and RNAi (GS) construct lines.

[1014] Discussion. We have now isolated lines harboring the G682 RNAi clade construct. These lines displayed no clear differences in morphology to wild-type controls. In particular, no obvious changes in trichome morphology or distribution were observed. Given that null mutants for one of the clade members, G1816 (SEQ ID NO: 76), are known to exhibit alterations in trichome density, it would appear the construct used was not sufficient to completely eliminate activity of that gene. The lack of a trichome phenotype thus indicates that the lines do not have bona fide knockdown for all of the G682 clade members. Detailed expression studies would be needed to assess the effects on activity of the different G682-related Arabidopsis genes in these plants.

[1015] Surprisingly, five of ten lines were less sensitive to ABA in a plate assay; this result is of interest since a G682 KO line and the RNAi (GS) lines also gave a positive result in ABA assays. In an initial run of a soil drought assay, though, G682 RNAi (clade) lines showed a wild-type performance.

[1016] Potential applications. The plate based results indicate that a knock-down approach with G682 may be used to afford stress tolerance. This is perhaps paradoxical, but it is possible that endogenous levels of G682 negatively regulate some genes which confer a benefit under stress conditions. An example of such an effect has recently been noted for a mutant of CBF2 (Novillo et al., 2004).

G226 (SEQ ID NO: 61 and 62; Arabidopsis thaliana)—Constitutive 35S

[1017] Background. G226 (SEQ ID NO: 62) is a paralog of G682. In earlier studies, 35S::G226 lines showed enhanced resistance to osmotic stress conditions. The G226 sequence (GenBank accession AX651522) has been included in patent publication WO 03000898. Recently a genetic analysis of G226 was published, focusing on developmental phenotypes, in which the gene was identified as an enhancer of TRY and CPC (Kirik et al., 2004b).

[1018] The aim of this study was to re-assess 35S::G226 lines and determine whether overexpression of the gene could confer enhanced stress tolerance in a comparable manner to G682. We also sought to test whether use of a two-component overexpression system would produce any strengthening of the phenotype relative to the use of a 35S direct promoter-fusion.

[1019] Morphological Observations. We have now produced 35S::G226 lines using the two component system. These plants exhibited a comparable glabrous phenotype to the G226 overexpression lines using a 35S direct promoter fusion construct. Some lines developed slowly and flowered later than wild type. T1 lines generally were glabrous. Many of the lines were noted to show a distinct reduction in size compared to controls. A reduction in size was not previously noted for 35S::G226 direct promoter fusion lines, and could reflect the possibility that higher levels of G226 activity were obtained with the two-component system. Seven of 20 lines were severely dwarfed and died prior to reaching maturity.

[1020] Physiology (Plate assays) Results. All 35S::G226 lines were glabrous, had reduced anthocyanin levels and showed increased root hair production. Eight of nine 35S::G226 lines performed better in the C:N sensing and growth under low nitrogen assays.

[1021] Eight of ten lines were more tolerant to ABA in a germination assay. Five of ten lines were tolerant to sucrose. Two of these lines were tolerant to cold stress during germination and growth.

[1022] The observed tolerance to these abiotic stress could be related to the fact that 35S::G226 lines do not produce anthocyanins, or to the observation that the lines generally have enhanced root hair growth.

[1023] Discussion. We have generated multiple sets of 35S::G226 lines using the two component system. These lines showed a strong glabrous phenotype, similar to what was observed during our previous studies, and similar to the effect produced by G682 overexpression. In addition, many of the 35S::G226 lines were noted to be smaller than controls, an effect that had not been previously recognized. Many of the primary transformants died before reaching maturity. All 35S::G226 lines were glabrous, had reduced anthocyanin levels and showed increased root hair production.

[1024] 35S::G226 lines have not yet been extensively tested in soil drought assays.

[1025] Potential applications. The current data support results of earlier studies indicating that G226 may be used to enhance abiotic stress tolerance. The positive results obtained in nitrogen assays indicate that G226 could be applied to enhance nutrient utilization traits. Based on the epidermal phenotypes shown by 35S::G226 lines, the gene might also be used to modify trichome or root hair development.

[1026] The reduction in size that was apparent in these lines suggests that G226 might require optimization by use of different promoters or protein modifications, prior to product development.

G226 (SEQ ID NO: 61 and 62; Arabidopsis thaliana)—Root ARSK1

[1027] Background. The aim of this project was to determine whether expression of G226 from an ARSK1 promoter, which drives expression in a root specific pattern, was sufficient to confer stress tolerance that is similar to, or better than, that seen in 35S::G226 lines.

[1028] Additionally this study allowed us to assess whether use of an alternative promoter could eliminate some of the undesirable size reductions that we have recently found to be associated with G226 overexpression, while still conferring enhanced stress tolerance.

[1029] Morphological Observations. ARSK1::G226 lines have been obtained using the 2-component system. The majority of these plants appeared wild type, but some size variation was apparent. Three T2 lines were later examined; plants from these populations were slightly small and slow developing relative to controls.

[1030] Physiology (Plate assays) Results. Three often ARSK1::G226 lines of seedlings were more tolerant than wild type in a cold growth assay.

[1031] Discussion. A total of thirty ARSK1::G226 lines have been obtained using the 2-component system. Most of the lines appeared wild type, but some were small and slow developing.

[1032] ARSK1::G226 plants showed no obvious increase in root hair density, as was seen in 35S::G226 lines. This latter result was perhaps unexpected given that ARSK1 drives expression within the root epidermis (see methods sections for details of promoter analysis). However, ARSK1 does not produce high level expression in the youngest differentiating region of the root; thus expression was likely not present in the regions where epidermal fate was being specified.

[1033] While ARSK1::G226 lines were more tolerant to cold than controls, expression of G226 from this root specific promoter was apparently not sufficient to produce a marked increase in tolerance to the other stresses tested. This could be because G226, like G682, has to be present in non-root tissues for stress tolerance to be attained, or because ARSK1 did not drive expression at high enough levels in the appropriate regions of the root.

[1034] Potential applications: Based on the results with overexpression lines, G226 is a candidate gene for increased cold stress tolerance.

G1816 (SEQ ID NO: 75 and 76; Arabidopsis thaliana)—Constitutive 35S

[1035] Background. G1816 corresponds to TRIPTYCHON (TRY), SEQ ID NO: 76, a gene that regulates epidermal cell specification in the leaf and root (Schnittger et al., 1998; 1999; Schellmann et al., 2002). G1816 is a paralog of G682 and was shown to confer increased resistance to osmotic stress conditions such as high levels of glucose.

[1036] The aim of this study was to re-assess 35S::G1816 lines and determine whether overexpression of the gene could confer enhanced stress tolerance in a comparable manner to G682. We also sought to examine whether use of a two-component overexpression system would produce any strengthening of the phenotype relative to the use of a 35S direct promoter-fusion.

[1037] Morphological Observations. 35S::G1816 lines produced using the two component system exhibited a comparable glabrous phenotype to G1816 overexpression lines produced using a 35S direct promoter fusion construct.

[1038] Three independent batches of 35S::G1816 two-component lines have been isolated. However, in addition to the glabrous effects, many of the lines were noted to be somewhat reduced in size compared to controls.

[1039] Line details are noted below:

[1040] Lines 301-315: Eight lines were completely glabrous. #303, 313 were partially glabrous. Of these lines, #301, 305, 311 were slightly smaller and slower developing than controls. #307, 308, 309, 314, 315 were very small and died early in the life cycle. No difference in coloration compared to wild-type was noted in the seed from this set of plants.

[1041] Lines 321-340: 14/20 lines were glabrous. 4/20 (#333, 334, 337, 339) were partially glabrous. All of the glabrous and partially glabrous plants were slightly reduced in size compared to wild type controls, at early stages of growth. 2/20 (#324, 332) appeared wild type. No difference in coloration compared to wild-type was noted in the seed from this set of plants.

[1042] Lines 341-354: all plants showed some evidence of a glabrous phenotype, with #346 being partially glabrous and the remainder being completely glabrous. All lines were smaller than wild type (20-70% wild-type size) at early stages of growth. No difference in coloration compared to wild-type was noted in the seed from this set of plants.

[1043] A number of T2 population were also morphologically examined. These plants showed a comparable phenotype to the primary transformants, being glabrous and generally smaller than controls.

[1044] Physiology (Plate assays) Results. 35S::G1816 lines were found to be insensitive to high glucose levels in a germination assay. 35S::G1816 leaves were glabrous and the plants also exhibited increased root hair density. We have now tested 35S::G1816 two-component lines; all ten of the lines tested showed excellent growth on sucrose in a germination assay. All these lines were also glabrous and displayed increased root hair density. These same lines performed well under our C:N sensing screen and in a root growth assays under low nitrogen, with 10 of 10 lines tested showing altered C/N sensing and better tolerance of low nitrogen conditions than controls.

[1045] Physiology (Soil Drought-Clay Pot) Summary. 35S::G1816 lines showed enhanced drought tolerance. Three independent (2-component) lines each showed significantly better survival than controls in a “whole pot” soil drought experiment.

TABLE 52
35S::G1816 drought assay results:

| | | Mean | Mean | p-value for | Mean | Mean | p-value for |
|---|---|---|---|---|---|---|---|
| | Project | drought | drought | drought score | survival for | survival for | difference in |
| Line | Type | score line | score control | difference | line | control | survival |
| 304 | TCST | 2.0 | 0.89 | 0.062* | 0.38 | 0.15 | 0.00036* |
| 304 | TCST | 0 | 0 | 1.0 | 0.010 | 0.010 | 1.0 |
| 345 | TCST | 1.5 | 0.89 | 0.45 | 0.33 | 0.15 | 0.0034* |
| 345 | TCST | 0 | 0.17 | 1.0 | 0.042 | 0.042 | 1.0 |
| 353 | TCST | 2.0 | 0.89 | 0.028* | 0.58 | 0.15 | 0.0000000022* |
| 353 | TCST | 0 | 0.17 | 1.0 | 0.021 | 0.021 | 1.0 |

TCST = Two component super transformation project
Survival = proportion of plants in each pot that survived
Drought scale: 6 (highest score) = no stress symptoms, 0 (lowest score; most severe effect) = extreme stress symptoms
*line performed better than control (significant at P < 0.11)

[1046] Discussion. 35S::G1816 two component lines showed a strong glabrous phenotype, similar to what was observed during our previous studies, and similar to the effect produced by G682 overexpression. However, many of the 35S::G1816 lines were noted to be smaller than controls, an effect that had not been previously recognized.

[1047] These soil-drought results were generally comparable to those observed for G682 lines, indicating that the G682 and G1816 likely have very related functions.

[1048] Potential applications. Based on the tolerance of 35S::G1816 lines to osmotic stress, G1816 is a good candidate gene for use in the alleviation of drought related stress. The strong performance of 35S::G1816 lines on plates containing high levels of sugar particularly indicates that the gene might also be used to manipulate sugar-sensing responses. The strong performance in nitrogen assays indicates that this gene may be useful for engineering crops for growth in nutrient limited conditions. However, the decrease in size seen in some of the lines suggests that the gene might require optimization by use of different promoters or protein modifications prior to product development.

[1049] The epidermal phenotypes seen in 35S::G1816 lines indicate that the gene could also be used to modify developmental characters such as the formation of trichomes or root hairs.

G1816 (SEQ ID NO: 75 and 76; Arabidopsis thaliana)—Epidermal CUT1

[1050] Background. The aim of this project was to determine whether expression of G1816 from a CUT1 promoter, which predominantly drives expression the shoot epidermis, and results in high level expression in guard cells, is sufficient to confer stress tolerance. This study was also conducted to assess an alternative promoter for eliminating undesirable size reductions noted with constitutive overexpression, while still conferring enhanced stress tolerance.

[1051] Morphological Observations. Arabidopsis lines in which G1816 was expressed from the CUT1 promoter via the 2-component system exhibited no consistent differences in growth and development compared to controls. Two sets of CUT1::G1816 lines (461-470 and 481-500) have been obtained and all individuals exhibited wild-type morphology.

[1052] Physiology (Plate assays) Results. Six out of ten lines of CUT1::G1816 seedlings show less severe stress symptoms (i.e., had lower levels anthocyanins) than controls when grown on low nitrogen. Some of the lines also showed better root development compared to controls in these conditions. However, on normal control MS plates, the lines were not generally noted to have increase root hair density.

[1053] In the C:N sensing screen, CUT1::G1816 seedlings were wild-type in their response.

[1054] Discussion. CUT1::G1816 two component lines showed no consistent morphological differences to wild type and did not show a glabrous phenotype. This could indicate either that CUT1 did not produce high enough levels of G1816 activity in the epidermis to repress trichome initiation, or that activity of G1816 is required in sub-epidermal layers to cause that effect. A comparable result was observed in both CUT1::G682 and CUT1::G2718 lines.

[1055] CUT1::G 816 seedlings typically had less anthocyanins and in some cases better root development, relative to controls, on low nitrogen growth plates. No other significant results were obtained in plate assays, and no enhanced performance versus wild-type was seen in abiotic stress experiments.

[1056] Potential applications. The CUT1::G1816 combination was less effective for producing abiotic stress tolerance than constitutive expression. Nonetheless, this combination may be of utility for engineering tolerance to nutrient limited conditions, particularly since the CUT1::G1816 lines did not show any of the developmental off-types that were seen in 35S overexpression lines.

G1816 (SEQ ID NO: 75 and 76; Arabidopsis thaliana col)—KO

[1057] Background. The aim of this study is to determine whether G1816 is necessary as part of the plant's natural protection against drought-related stress, by obtaining and testing a null mutant under such conditions.

[1058] Morphological Observations. A G1816 T-DNA insertion line, SALK_{—}029760 (NCBI acc. no. BH789490, version BH789490.1; GI:19882588; SALK_{—}029760.51.00.x Arabidopsis thaliana TDNA insertion lines Arabidopsis thaliana genomic clone SALK_{—}029760.51.00.x, genomic survey sequence) was obtained from the ABRC at Ohio State University. BLAST analysis of the sequence from the insertion point deposited in GenBank by SALK indicated that the T-DNA in this line was integrated about 33 bp downstream of the G1816 start codon.

[1059] Two of twenty plants among individuals were observed to display irregularly spaced trichomes (lines 409, 410). The progeny of these lines were morphologically examined, and all showed irregularities in trichome spacing and structure. Trichomes appeared in unevenly spaced clusters, and in many cases exhibited four rather than three branches. Based on the trichome phenotype, which corresponds to the published try phenotype, and 100% KanR among those plants, it was concluded that the line 409 and 410 populations were homozygous.

[1060] Physiology (Plate assays) Results. G1816 knockout lines from two independent homozygous plants for the SALK insertion line: SALK_{—}029760 were more tolerant than wild type when germinated in the presence of 150 mM sodium chloride.

[1061] Discussion. We have identified a putative homozygous line for a T-DNA insertion within the G1816 sequence. These plants show a comparable phenotype to that described in the public literature for try mutants, and show irregularly spaced clusters of trichomes (Schnittger et al., 1998; 1999; Schellmann et al., 2002).

[1062] Potential applications. From our previous studies, we concluded that G1816 could be used to confer increased tolerance to a variety of abiotic stresses. The KO identified here may be useful in further elucidation of G682-related stress tolerance mechanisms. Additionally, the positive results seen in the plate based NaCl assay indicate that stress tolerance may be achieved through knock-down approaches on the G682 group.

G2718 (SEQ ID NO: 63 and 64; Arabidopsis thialiana)—Constitutive 35S

[1063] Background. G2718 (SEQ ID NO: 64) is a paralog of G682. The aim of this study was to re-assess 35S::G2718 lines and determine whether overexpression of the gene could confer enhanced stress tolerance in a comparable manner to G682.

[1064] Morphological Observations. 35S::G2718 lines were been obtained using the two-component system; we isolated twenty four lines (341-344; 421-440). These plants exhibited a comparable glabrous phenotype to the G2718 overexpression lines produced using a 35S direct promoter fusion construct.

[1065] It should be noted that many of the two-component lines showed a reduction in overall size, particularly at early stages of the life cycle. Such an effect was also noted for some of the lines obtained during our genomics program.

[1066] Three of four lines in the 341-344 set (all except #344) were completely glabrous. All of the lines in the 421-440 set were completely glabrous, except for #421, 422, 423, 424, 426, 430, 434, 436, 438, and 440, which exhibited a partially glabrous phenotype. Three lines were also examined in the T2 generation and each showed a glabrous phenotype combined with reduced size. No changes in seed coat coloration were noted in any of the lines.

[1067] Physiology (Plate assays) Results. Eight of ten 35S::G2718 lines were glabrous, and had reduced anthocyanin levels, showed increased root hair production. Eight of 10 lines were more tolerant than controls to growth assay in a sucrose germination assay. Nine of 10 lines exhibited altered C/N sensing relative to controls, and all ten lines tested were more tolerant than controls to low nitrogen conditions in a root growth determination.

[1068] Discussion. We have now isolated 35S::G2718 lines using the two component system. These lines showed a strong glabrous phenotype and increased root hair production, similar to what was observed during our initial genomics study, and similar to the effect produced by G682 overexpression. Many of the 35S::G2718 lines were noted to be smaller than controls. These lines also typically had reduced anthocyanin levels.

[1069] 35S::G2718 lines typically were more tolerant than controls in sucrose germination assays and performed very well relative to controls in a low-nitrogen germination and growth assays (scoring higher than 35S::G682 lines in these assays). The observed tolerance to these abiotic stress could be related to the fact that 35S::G2718 lines do not produce anthocyanins, or to the observation that these lines generally have enhanced root hair growth.

[1070] Potential applications. The epidermal phenotypes seen in 35S::G2718 lines indicate that this gene could also be used to modify developmental characters such as the formation of trichomes or root hairs. The results from these experiments indicate that G2718 has a similar activity to G682 and could be used to enhance tolerance to abiotic stress and/or low nutrient conditions.

G3392 (SEQ ID NO: 71 and 72; Oryza sativa)—Constitutive 35S

[1071] Background. G3392 (SEQ ID NO: 71) is a rice ortholog of G682. The aim of this project was to determine whether G3392 has an equivalent function to the G682-related genes from Arabidopsis via the analysis of 35S::G3392Arabidopsis lines.

[1072] Morphological Observations. Overexpression of G3392 in Arabidopsis produced a glabrous phenotype and a slight reduction in overall plant size. Additionally, a loss of seed coat coloration was noted in some of the lines.

[1073] The above effects were observed in three different batches of 35S::G3392 lines as detailed below:

[1074] Lines 301-306: all plants were completely glabrous, and slightly small. 5/6 lines (all except #302) yielded pale seed; this effect was particularly strong in lines #301 and 305.

[1075] Lines 321-322: both plants were completely glabrous, slightly small and yielded pale seed.

[1076] Lines 341-349: all were completely glabrous and slightly small at all stages of growth. Seed from these lines were pale.

[1077] Three T2 populations were morphologically examined (see table below) and all showed equivalent phenotypes to those seen among T1 lines.

[1078] Physiology (Plate assays) Results. 35S::G3392 lines performed well in plate based assays in that they showed less stress symptoms than control plants. As indicated by anthocyanin production, all lines showed positive results in cold germination and cold growth assays. In addition, all lines gave positive results in a C:N sensing screen and in a root growth assay under low N. Better tolerance than controls was also noted for three lines (306, 342, and 346) in sucrose, mannitol, and NaCl germination assays.

[1079] Discussion. We have now generated 35S::G3392 lines; these plants showed comparable morphological effects to 35S::G682 lines and exhibited a glabrous phenotype combined with a reduction in overall size. Such similarities in phenotypes indicate that the proteins have similar activities. Interestingly, many of the 35S::G3392 lines also produced pale yellow seed, which likely indicated a reduction in anthocyanin levels in the seed coat. Such an effect was not observed 35S::G682 seed, but G682 and its paralogs were found during our genomics studies to inhibit anthocyanin production. It should be noted that the apparent tolerance of 35S::G3392 lines in many of the plate based assays might have been related to the absence of anthocyanins, rather than increased vigor per se.

[1080] Physiology (Soil Drought-Clay Pot) Summary. In clay-pot soil drought assays, results have been variable. Three 35S::G3392 lines were each assayed three separate times. One line was more tolerant to drought than controls.

[1081] Potential application: Based on the performance of 35S::G3392 in stress assays, the G3392 protein likely regulated some of the same pathways as G682. G3392 therefore has potential utility for stress resistance or nutrient utilization traits in commercial plants.

[1082] The effect of G3392 on epidermal patterning indicates that the gene could be applied to manipulate trichome development; in some species trichomes accumulate valuable secondary metabolites and in other instances are thought to provide protection against predation.

[1083] Change in seed coloration observed in 35S::G3392 lines indicates that the gene might also be used to regulate production of flavonoid related compounds, which affect the nutritional value of foodstuffs.

G3393 (SEQ ID NO: 65 and 66; Oryza sativa)—Constitutive 35S

[1084] Background. G3393 (SEQ ID NO: 65) is a closely-related rice homolog of G682. The aim of this project was to determine whether G3393 has an equivalent function to the G682-related genes from Arabidopsis via the analysis of 35S::G3393 Arabidopsis lines.

[1085] Morphological Observations. Overexpression of G3393 in Arabidopsis produced a glabrous phenotype and a slight reduction in overall plant size. Additionally, a loss of seed coat coloration was noted in some of the lines.

[1086] Line details, as compared to controls:

[1087] T1 lines 301-309: all plants were completely glabrous, and slightly small. A reduction in seed coat pigmentation was seen to various extents in the seed from these lines. Most of the lines showed a slight yellowing of the seed coat. Line 305, however, showed a strong effect and its seed were almost completely yellow. Seed from line 308 showed wild-type coloration.

[1088] T1 lines 321-333: all were slightly small and completely glabrous except for #329. #327 and 330 produced very pale seed. #328 and 332 produced slightly pale seed. #323, 326, 333 yielded very marginally lighter colored seed than wild type. Seed coloration in the remaining lines appeared wild type.

[1089] Three T2 populations were also examined; plants from all three of these populations were slightly small and glabrous. Interestingly, T2-323 plants and occasional plants from the other two T2 lines were early flowering. This phenotype was not noted on other plant dates or in the T1 generation, suggesting that it could have depended on environmental variables which might have differed between the plantings.

[1090] Physiology (Plate assays) Results. Nine of ten 35S::G3393 lines performed well in chilling growth assays as well as in the C:N sensing. All lines exhibited altered C/N sensing relative to controls. All lines also performed better than controls in a root growth assay in low nitrogen conditions. 35S::G3393 lines also showed a glabrous phenotype and exhibited increased root hair density relative to controls.

[1091] Discussion. We have now generated 35S::G3393 lines; these plants showed comparable morphological effects to 35S::G682 lines and exhibited a glabrous phenotype combined with a reduction in overall size. These similarities in phenotypes indicate that the proteins have similar activities. Interestingly, many of the 35S::G3393 lines also produced pale yellow seed, which likely indicated a reduction in anthocyanin levels in the seed coat. Such an effect was not observed 35S::G682 seed, but G682 and its paralogs were found during our genomics studies to inhibit anthocyanin production.

[1092] The better performance of 35S::G3393 lines in physiology assays may reflect reduced production of anthocyanins in 35S::G3393 seedlings.

[1093] In clay-pot soil drought assays, results have been variable.

[1094] Potential application: Based on the performance of 35S::G3393 in plate assays, it is clear that G3393 has potential utility for conferring abiotic stress resistance in commercial plants. However, the gene may need to be optimized for commercial application to mitigate the effects of G3393 on growth.

[1095] The effect of G3393 on epidermal patterning indicates that the gene could be applied to manipulate trichome development; in some species trichomes accumulate valuable secondary metabolites and in other instances are thought to provide protection against predation.

[1096] Change in seed coloration observed in 35S::G3393 lines indicates that the gene might also be used to regulate production of flavonoid related compounds, which affect the nutritional value of foodstuffs.

G3431 (SEQ ID NO: 67 and 68; Zea mays)—Constitutive 35S

[1097] Background. G3431 (SEQ ID NO: 67) is a closely-related maize homolog of G682. The aim of this project was to determine whether G3431 has an equivalent function to the G682-related genes from Arabidopsis via the analysis of 35S::G3431 Arabidopsis lines.

[1098] Morphological Observations. Overexpression of G3431 in Arabidopsis produced a glabrous phenotype and a slight reduction in overall plant size. Additionally, a loss of seed coat coloration was noted in some of the lines. These effects were observed in two different batches of 35S::G3431 lines as detailed below:

[1099] T1 lines 301-306: all plants were completely glabrous, and slightly small. A reduction in seed coat pigmentation was seen in lines #302, 303, 304, and 305. Lines 301 and 306 yielded wild-type colored seed.

[1100] T1 lines 321-340: all were slightly small and completely glabrous. Seeds from lines 335, 336, 337, 339 were pale in coloration. Other lines showed wild-type seed coloration.

[1101] Glabrous effects were also noted in each of three T2 populations. Plants from one of these populations, T2-303, also flowered early, but that effect was line specific and was not noted in the other lines.

[1102] Physiology (Plate assays) Results. Seven out often 35S::G3431 lines performed well in C:N sensing and growth under low nitrogen assays. The same lines also performed well in growth under chilling conditions. A small subset of these lines also did well in germination assays in the presence of high sucrose levels (versus controls). 35S::G3431 seedlings also showed a glabrous phenotype and three often lines had increased root hair density.

[1103] Discussion. We have now generated 35S::G3431 lines; these plants showed comparable morphological effects to 35S::G682 lines and exhibited a glabrous phenotype combined with a small reduction in overall size. These similarities in phenotypes indicate that the proteins have similar activities. Interestingly, some of the 35S::G3431 lines also produced pale yellow seed, which likely indicated a reduction in anthocyanin levels in the seed coat. Such an effect was not observed in 35S::G682 seed, but G682 and its paralogs were found during our genomics studies to inhibit anthocyanin production.

[1104] Surprisingly, in clay-pot soil drought assays, 35S::G3431 consistently showed greater sensitivity to drought.

[1105] We previously concluded that G3431 is equivalent to another maize gene, G3444 (SEQ ID NO: 69). However, it should be noted that the construct for G3431 gave a higher penetrance of positive results in the N assays, and the glabrous phenotype, compared to the G3444. This might be attributed to differences in the amounts of UTR included in the constructs.

[1106] Potential application: That 35S::G3431 gave an enhanced performance in some of the plate based assays indicates the gene may be used to effect abiotic stress tolerance. However, the gene would likely need to be optimized for commercial application to mitigate the effects of G3431 on growth.

[1107] The effect of G3431 on epidermal patterning indicates that the gene could be applied to manipulate trichome development; in some species trichomes accumulate valuable secondary metabolites and in other instances are thought to provide protection against predation.

[1108] Change in seed coloration observed in 35S::G3431 lines indicates that the gene might also be used to regulate production of flavonoid related compounds, which affect the nutritional value of foodstuffs.

G3444 (SEQ ID NO: 69 and 70; Zea mays)—Constitutive 35S

[1109] Background. G3444 is a maize gene closely related to G682. The aim of this project was to determine whether G3444 has an equivalent function to the G682-related genes from Arabidopsis via the analysis of 35S::G3444 Arabidopsis lines.

[1110] Morphological Observations. Overexpression of G3444 in Arabidopsis produced a glabrous phenotype and a reduction in overall plant size. Additionally, a loss of seed coat coloration was noted in some of the lines.

[1111] T1 Line Details:

[1112] Lines 321-340: 8/20 plants (#322, 323, 324, 325, 331, 333, 337, and 340) were glabrous and slightly small compared to wild type. The remaining lines showed no consistent differences in morphology to controls. Seed produced by lines #323, 324, 325 and 340 were slightly paler than wild type whereas seed from other lines showed wild-type coloration.

[1113] Three T2 populations were examined:

[1114] T2-331: plants were all slightly small and glabrous.

[1115] T2-333: plants were pale, rather early flowering, and had trichomes.

[1116] T2-334: plants were pale, rather early flowering, and had trichomes.

[1117] Physiology (Plate assays) Results. Four out of ten 35S::G3444 lines performed well in a root growth assay under low nitrogen. The plants also produced less anthocyanin and fewer trichomes. Three lines showed a higher density root hairs versus controls.

[1118] Physiology (Soil Drought-Clay Pot) Summary. One line was observed to recover from drought better than wild-type controls.

[1119] Discussion. We have now generated 35S::G3444 lines; these plants showed comparable morphological effects to 35S::G682 lines and exhibited a glabrous phenotype combined with a reduction in overall size. These similarities in phenotypes indicate that the proteins have similar activities. Interestingly, some of the 35S::G3444 lines also produced pale yellow seed, which likely indicated a reduction in anthocyanin levels in the seed coat. Such an effect was not observed 35S::G682 seed, but G682 and its paralogs were found during our genomics studies to inhibit anthocyanin production.

[1120] We previously concluded that G3444 is equivalent to another maize gene, G3431. However, it should be noted that the construct for G3431 gave a higher penetrance of positive results in the N assays, and the glabrous phenotype compared to the G3444. This might be attributed to differences in the amounts of UTR included in the constructs.

[1121] Potential applications. Based on the results obtained, G3444 could be used to effect abiotic stress tolerance (also see also G3431 results and discussion, above).

G3445 (SEQ ID NO: 83 and 84; Glycine max)—Constitutive 35S

[1122] Background. G3445 is a soy gene that is closely related to G682. The aim of this project was to determine whether G3445 has an equivalent function to the G682-related genes from Arabidopsis via the analysis of 35S::G3445 Arabidopsis lines.

[1123] Morphological Observations. Overexpression of G3445 in Arabidopsis produced a partial glabrous phenotype and a slight reduction in overall plant size. These effects were observed in three different batches of 35S::G3445 lines as detailed below:

[1124] Lines 301-303: line 301 was completely glabrous, lines 302 and 303 were partially glabrous. All lines three lines were slightly small and slower in developing and flowering than controls. Seed coloration was wild type in all three lines.

[1125] Lines 321-325: all were partially glabrous, but otherwise were wild type. Seed coloration was wild type in these lines.

[1126] Lines 341-347: all were glabrous to varying extents. Lines 341 and 344 showed the strongest effects and were also small versus wild type plants.

[1127] Three lines were morphologically examined in the T2 generation (301, 302, and 347); all exhibited a partial glabrous phenotype.

[1128] Physiology (Plate assays) Results. Four out of ten 35S::G3445 seedlings germinated in the presence of ABA. Some lines also produced fewer trichomes than control seedlings.

[1129] Discussion. 35S::G3445 lines exhibited a partially glabrous phenotype combined with a slight reduction in overall size, similar to 35S::G682. These phenotypic similarities indicate that the proteins have similar activities.

[1130] In plate-based physiological assays, we found that four of ten 35S::G3445 lines were ABA insensitive. There were no significant differences observed in the other plate-based physiology assays or in clay-pot soil drought assays.

[1131] Potential applications. Based on the results reported here, we have evidence that G3445 can be used to promote abiotic stress tolerance in commercial species.

[1132] The effect of G3445 on epidermal patterning indicates that the gene could be applied to manipulate trichome development; in some species trichomes accumulate valuable secondary metabolites and in other instances are thought to provide protection against predation.

G3446 (SEQ ID NO: 81 and 82; Glycine max)—Constitutive 35S

[1133] Background. G3446 (SEQ ID NO: 82) is a soy gene that is closely related to G682. The aim of this project was to determine whether G3446 has an equivalent function to the G682-related genes from Arabidopsis via the analysis of 35S::G3446 Arabidopsis lines.

[1134] Morphological Observations. Overexpression of G3446 in Arabidopsis produced a glabrous phenotype, a reduction in overall plant size, and alterations in flowering time.

[1135] Line Details:

[1136] T1 Lines 301-320: 18/20 were glabrous to various extents and also slightly small compared to controls. Of these lines, all were almost completely glabrous except for #302, 305, and 309 which were partially glabrous. 2/20 lines (#316, 320) appeared wild type. No obvious difference in seed coloration compared to controls was noted in this batch of lines.

[1137] Three lines were examined in the T2 generation (302, 303, and 311). All showed a glabrous phenotype. Alterations in flowering time were also seen, but these were rather inconsistent between lines. T2-302 plants were small and early flowering, whereas line 303 plants were late developing. Plants from line 311 flowered at the same time as controls.

[1138] Physiology (Soil Drought-Clay Pot) Summary. Three independent 35S::G3446 lines were tested in a single run of a whole pot soil drought assay. One of these lines (#302) showed significantly greater survival compared to controls. However, another line (#311) showed significantly worse survival. The third line (#303) showed a wild-type performance.

TABLE 53
35S::G3446 drought assay results:

| | | Mean | Mean | p-value for | Mean | Mean | p-value for |
|---|---|---|---|---|---|---|---|
| | Project | drought | drought score | drought score | survival for | survival for | difference in |
| Line | Type | score line | control | difference | line | control | survival |
| 302 | DPF | 4.8 | 3.8 | 0.17 | 0.72 | 0.57 | 0.033* |

DPF = direct promoter fusion project
Survival = proportion of plants in each pot that survived
Drought scale 6 (highest score) = no stress symptoms, 0 (lowest score; most severe effect) = extreme stress symptoms
*line performed better than control (significant at P < 0.11)

[1139] Discussion. 35S::G3446 lines showed comparable morphological effects to 35S::G682 lines, as they exhibited a glabrous phenotype combined with a slight reduction in overall size. These similarities indicate that the proteins have similar activities.

[1140] We previously concluded that G3446 is equivalent to another soy gene, G3447. The phenotypes of 35S::G3446 and 35S::G3447 were equivalent. Both genes were subjected to plate-based assays as well as clay-pot soil drought assays. 35S::G3446 and 35S::G3447 both showed no consistent differences to wild-type in plate-based physiological assays, and showed no clear-cut effects on root hair density. They also both showed equivocal results in clay-pot soil drought assays. Although some lines showed an increased tolerance to drought (e.g., line 302), other lines showed a worse performance compared to wild-type.

[1141] These results demonstrate that within the G682 study group, the glabrous phenotype is separable from both the effects on root hair patterning and the stress tolerance phenotypes.

[1142] Potential applications. Given the inconsistent soil-drought data, and the wild-type performance in plate assays, it remains to be determined whether G3446 could be applied to effect abiotic stress tolerance in commercial species. However, based on the soil assay results, there is some indication that under certain conditions, G3446/G3447 may enhance drought tolerance.

[1143] The effect of G3446 on epidermal patterning indicates that the gene could be applied to manipulate trichome development; in some species trichomes accumulate valuable secondary metabolites and in other instances are thought to provide protection against predation.

G3447 (SEQ ID NO: 85 and 86; Glycine max)—Constitutive 35S

[1144] Background. G3447 is a soy gene that is closely related to G682. The aim of this project was to determine whether G3447 has an equivalent function to the G682-related genes from Arabidopsis via the analysis of 35S::G3447 Arabidopsis lines.

[1145] Morphological Observations. Overexpression of G3447 in Arabidopsis produced a glabrous phenotype and a reduction in overall plant size.

[1146] All lines from batch 301-320 were either completely glabrous or almost completely glabrous. Additionally many of the plants displayed a slight reduction in overall size compared to controls. No obvious difference in seed coloration compared to controls was noted in this batch of lines.

[1147] Three T2 lines were later examined. Plants from each of these populations were glabrous and showed small rosettes. Plants from one of the lines (#316) were also early flowering. This effect was not seen in the other lines and had not been noted in the T1 generation.

[1148] Physiology (Plate assays) Results. Three lines of 35S::G3447 seedlings produced less anthocyanin in a root growth assay under low nitrogen. 35S::G3447 seedlings did not produce trichomes.

[1149] Physiology (Soil Drought-Clay Pot) Summary:

[1150] Seven independent 35S::G3447 lines were examined in soil drought assays. One of these lines (#310) exhibited a significantly better survival and recovery than wild-type controls on two different plant dates.

TABLE 54
35S::G3447 drought assay results:

| | | | Mean | | | | |
|---|---|---|---|---|---|---|---|
| | | Mean | drought | p-value for | Mean | Mean | |
| | Project | drought | score | drought score | survival for | survival for | p-value for difference |
| Line | Type | score line | control | difference | line | control | in survival |
| 310 | DPF | 3.8 | 3.8 | 0.83 | 0.54 | 0.57 | 0.65 |
| 310 | DPF | 1.5 | 0.60 | 0.016* | 0.14 | 0.050 | 0.017* |
| 310 | DPF | 3.6 | 1.3 | 0.0033* | 0.67 | 0.25 | 0.0000000000085* |

DPF = direct promoter fusion project
Survival = proportion of plants in each pot that survived
Drought scale: 6 (highest score) = no stress symptoms, 0 (lowest score; most severe effect) = extreme stress symptoms
*line performed better than control (significant at P < 0.11)

[1151] Discussion. 35S::G3447 lines showed comparable morphological effects to 35S::G682 lines, as they exhibited a glabrous phenotype combined with a slight reduction in overall size. These similarities indicate that the proteins have similar activities.

[1152] We previously concluded that G3447 is equivalent to another soy gene, G3446. The phenotypes of 35S::G3446 and 35S::G3447 were similar. Lines for both genes were subjected to plate-based assays as well as clay-pot soil drought assays, and similar results were obtained. 35S::G3446 and 35S::G3447 both showed no clear-cut difference to wild-type in plate-based physiological assays. However, a small number of the G3447 lines were more tolerant than wild-type controls in low N growth assays. Results for 35S::G3447 lines from the clay-pot soil drought assays were also somewhat inconclusive. A single line showed enhanced tolerance (line 310, in triplicate assays planted on three different dates), but other lines showed a worse performance than controls in one or more plantings.

[1153] These results demonstrate that within the G682 study group, the glabrous phenotype is separable from both the effects on root hair patterning and the stress tolerance phenotypes.

[1154] Potential applications. Given the soil-drought data, it is possible that under some conditions that G3446/G3447 may promote tolerance to drought-related stress. However, the gene appears to be less effective in this regard than G682.

[1155] The effect of G3447 on epidermal patterning indicates that the gene could be applied to manipulate trichome development; in some species trichomes accumulate valuable secondary metabolites and in other instances are thought to provide protection against predation.

G3448 (SEQ ID NO: 79 and 80; Glycine max)—Constitutive 35S

[1156] Background. G3448 (SEQ ID NO: 79) is a soy gene that is closely related to G682. The aim of this project was to determine whether G3448 has an equivalent function to the G682-related genes from Arabidopsis via the analysis of 35S::G3448 Arabidopsis lines.

[1157] Morphological Observations. Overexpression of G3448 in Arabidopsis produced a glabrous phenotype and a reduction in overall plant size.

[1158] All twenty T1 lines from batch 301-320 were either completely glabrous or almost completely glabrous. Additionally, many of the plants displayed a reduction in overall size compared to controls. The most strongly affected lines (#311, 313, 315, 320) were particularly small and had leaf tissue that was paler than that of wild type. A number of T2 populations (see table below) from these line were examined and comparable phenotypes were seen to those in the T1 plants.

[1159] No obvious difference in seed coloration compared to controls was noted in 35S::G3448 lines.

[1160] Physiology (Plate assays) Results. All ten 35S::G3448 lines performed better in the C:N sensing and growth under low nitrogen assays. All lines produced more root hairs, and lacked trichomes. Three of ten lines also were more tolerant than wild-type in a chilling growth assay.

[1161] Physiology (Soil Drought-Clay Pot) Summary. One line of 35S::G3448 plants (# 308) exhibited significantly better survival than controls.

TABLE 55
35S::G3448 drought assay results

| | | Mean | Mean | p-value for | Mean | Mean | p-value for |
|---|---|---|---|---|---|---|---|
| | Project | drought | drought score | drought score | survival for | survival for | difference in |
| Line | Type | score line | control | difference | line | control | survival |
| 308 | DPF | 4.0 | 2.8 | 0.21 | 0.58 | 0.41 | 0.0041* |

DPF = direct promoter fusion project
Survival = proportion of plants in each pot that survived
Drought scale: 6 (highest score) = no stress symptoms, 0 (lowest score; most severe effect) = extreme stress symptoms
*line performed better than control (significant at P < 0.11)

[1162] Discussion. 35S::G3448 showed phenotypes that were similar to 35S::G682 lines, exhibiting a glabrous phenotype combined with a reduction in overall size. These similarities in phenotypes indicate that the proteins have similar activities. Additionally the 35S::G3448 lines showed a somewhat lighter coloration than controls, perhaps indicating that levels of pigments such as anthocyanins were reduced in leaf tissue.

[1163] In plate-based physiological assays three of ten 35S::G3448 lines were tolerant of chilling, and all lines tested did well in low-nitrogen root growth and C/N sensing assays. The lines also showed increased root hair density. The better performance than controls might reflect the plants inability to make anthocyanins.

[1164] In clay-pot soil drought assays, a single line (#308) showed a drought resistant phenotype.

[1165] Potential applications. Based on the physiology results obtained, G3448 may be applied to effect abiotic stress tolerance in commercial species.

[1166] The effect of G3448 on epidermal patterning indicates that the gene could be applied to manipulate trichome development; in some species trichomes accumulate valuable secondary metabolites and in other instances are thought to provide protection against predation. The lighter coloration of 35S::G3448 plants could indicate that G3448 may be used to regulate the production of flavonoid related compounds, which contribute to the nutritional value of foodstuffs.

G3449 (SEQ ID NO: 77 and 78; Glycine max)—Constitutive 35S

[1167] Background. G3449 (SEQ ID NO: 77) is a soy gene that is a closely-related homolog of G682. The aim of this project was to determine whether G3449 has an equivalent function to the G682-related genes from Arabidopsis via the analysis of 35S::G3449 Arabidopsis lines.

[1168] Morphological Observations. Overexpression of G3449 in Arabidopsis produced a glabrous phenotype and a reduction in overall plant size.

[1169] Eighteen of twenty lines from batch 301-320 were either completely glabrous or almost completely glabrous. Two of twenty lines (#302, 304) appeared wild type. All of the glabrous plants were markedly small and in most instances developed more slowly than wild-type controls. These lines also were somewhat paler than controls at the seedling stage. No obvious alteration in coloration was observed in the seed from this batch of plants.

[1170] Three T2 populations were also examined; the plants were small and showed glabrous effects, as had been seen in the T1.

[1171] Physiology (Plate assays) Results. Nine out of ten 35S::G3448 lines performed better in the C:N sensing and growth under low nitrogen assays. Some lines produced less anthocyanin in cold conditions than wild type. All lines produced more root hairs, and showed a glabrous phenotype.

[1172] Discussion. We have now generated 35S::G3449 lines; these plants showed comparable morphological effects to 35S::G682 lines and exhibited a glabrous phenotype combined with a slight reduction in overall size. These similarities in phenotypes indicate that the proteins have similar activities. Additionally, 35S::G3449 transformants were distinctly paler than wild-type at the seedling stage, perhaps indicating a reduction in the levels of pigments such as anthocyanins. The better performance in C/N sensing and cold assays may reflect the plants reduced production of anthocyanins.

[1173] Potential applications. Based on the results of plate assays, G3449 may be applied to effect abiotic stress tolerance. However, the gene appears to be less effective for drought related stress than G682.

[1174] The effect of G3449 on epidermal patterning indicates that the gene could be applied to manipulate trichome development; in some species trichomes accumulate valuable secondary metabolites and in other instances are thought to provide protection against predation. The lighter coloration of 35S::G3449 plants could indicate that G3449 may be used to regulate the production of flavonoid related compounds, which contribute to the nutritional value of foodstuffs.

G3450 (SEQ ID NO: 73 and 74; Glycine max)—Constitutive 35S

[1175] Background. G3450 (SEQ ID NO: 73) is a soy gene that is a closely-related homolog of G682. Based on a phylogenetic tree built using conserved MYB domains, the G3450 protein appears to be more closely related to the G682-clade of Arabidopsis genes than any of the other homologs included the study. The aim of this project was to determine whether G3450 has an equivalent function to the G682-related genes from Arabidopsis via the analysis of 35S::G3450 Arabidopsis lines.

[1176] Morphological Observations. Overexpression of G3450 in Arabidopsis produced a glabrous phenotype and a slight reduction in overall plant size. Additionally, a loss of seed coat coloration was noted in some of the lines. These effects were observed in three different batches of 35S::G3450 T1 lines as detailed below:

[1177] Lines 301-318: all plants were completely glabrous or almost completely glabrous, slightly small, and rather pale in coloration compared to controls. Three of the eighteen lines (#311, 312, and 314) were very small and perished prior to flowering. The seed coloration from this batch of lines was generally marginally paler than in the controls. The strongest reduction in seed coloration was seen in line #309 and the seed from that line were also slightly larger than in wild type.

[1178] Lines 321-336: all plants were completely glabrous or almost completely glabrous, and slightly small. No obvious alterations in seed coloration were observed in this batch of lines.

[1179] Lines 341-360: all plants were completely glabrous and slightly small. 2/20 lines showed accelerated flowering.

[1180] Three lines T2-304, T2-315 and T2-317 were later examined in the T2 generation. All plants from those populations were glabrous, slightly small, and slightly late developing compared to wild type.

[1181] Of the lines submitted for physiological testing, the following showed a segregation on selection plates in the T2 generation that was compatible with the transgene being present at a single locus: 304, 305, 307, 313, 315, and 317. Lines 301, 302, 303 showed segregation that was compatible with insertions at multiple loci.

[1182] Physiology (Plate assays) Results. All 35S::G3450 lines were glabrous, had reduced anthocyanin levels and showed increased root hair production. Nine of ten 35S::G3450 lines performed better in the C:N sensing and growth under low nitrogen assays.

[1183] Six often lines (#302, 303, 304, 307, 315, and 317) were more tolerant of cold stresses on germination. Two of these lines (315, 317) showed an enhanced performance in salt germination assays and one of the lines (302) showed increased heat tolerance on germination. Enhanced tolerance was also observed in growth assays under heat stress (304, 307, and 315) and chilling (303, 307, 313, 315, and 317). Two often lines (306, 315) also showed an enhanced performance in a severe dehydration assay.

[1184] Physiology (Soil Drought-Clay Pot) Summary. Overexpression of G3450 produced a marked increase in drought tolerance in Arabidopsis. Four independent lines were tested and three of these lines showed positive effects.

[1185] Line 317 showed significantly better survival than wild type in 2 of 3 plantings. Line 315 showed significantly better survival than wild type in 1 of 3 plantings. Line 304 showed significantly better survival than wild type in 1 of 1 planting.

TABLE 56
35S::G3450 drought assay results:

| | | | Mean | | | | |
|---|---|---|---|---|---|---|---|
| | | Mean | drought | p-value for | Mean | Mean | |
| | Project | drought | score | drought score | survival | survival for | p-value for difference in |
| Line | Type | score line | control | difference | for line | control | survival |
| 304 | DPF | 2.6 | 0.60 | 0.0024* | 0.67 | 0.13 | 0.0000000000000025* |
| 315 | DPF | 2.7 | 2.8 | 0.85 | 0.38 | 0.41 | 0.62 |
| 315 | DPF | 1.9 | 1.5 | 0.43 | 0.25 | 0.32 | 0.38 |
| 315 | DPF | 2.3 | 0.10 | 0.00016* | 0.66 | 0 | 0.0000016* |
| 317 | DPF | 2.3 | 2.8 | 0.64 | 0.38 | 0.41 | 0.56 |
| 317 | DPF | 3.8 | 1.8 | 0.0065* | 0.67 | 0.35 | 0.00000024* |
| 317 | DPF | 2.1 | 0.10 | 0.00012* | 0.55 | 0.0071 | 0.00000061* |

DPF = direct promoter fusion project
Survival = proportion of plants in each pot that survived
Drought scale: 6 (highest score) = no stress symptoms, 0 (lowest score; most severe effect) = extreme stress symptoms
*line performed better than control (significant at P < 0.11)

[1186] Discussion. We have now generated 35S::G3450 lines; these plants showed comparable morphological effects to 35S::G682 lines and exhibited a glabrous phenotype combined with a slight reduction in overall size. These similarities in phenotypes indicate that the proteins have similar activities. Interestingly, 35S::G3450 lines were slightly pale and some of the lines produced pale yellow seed, which likely indicated a reduction in anthocyanin levels in the seed coat. Such an effect was not observed in 35S::G682 seed, but G682 and its paralogs were found during our genomics studies to inhibit anthocyanin production. The observed tolerance to some of these abiotic stress could be related to the fact that 35S::G3450 lines do not produce anthocyanins, or to the observation that these lines generally have enhanced root hair growth.

[1187] The comparable morphological and physiological effects obtained in 35S::G3450 lines versus overexpression lines for the G682-related Arabidopsis genes, indicates that the G3450 protein has a very similar or equivalent activity to the Arabidopsis proteins.

[1188] Potential applications. Based on the positive results of plate based assays and soil drought assays, G3450 could be used to confer tolerance to drought-related and low nutrient stress.

[1189] The effect of G3450 on epidermal patterning also indicate that the gene could be applied to manipulate trichome development; in some species trichomes accumulate valuable secondary metabolites and in other instances are thought to provide protection against predation. The lighter coloration observed in 35S::G3450 leaf tissue and seeds could indicate that G3450 may be used to regulate the production of flavonoid related compounds, which contribute to the nutritional value of foodstuffs.

### The G867 Clade

[1190] G867 (SEQ ID NO: 87 and 88; Arabidopsis thaliana)—Constitutive 35S

[1191] Background. G867 corresponds to RAV1 (Kagaya et al., 1999) and was selected for the drought program based on the enhanced resistance of 35S::G867 lines to abiotic stress treatments. G867 has been reported as involved in a brassinosteroid signaling pathway, and was found to cause reductions in lateral root and rosette leaf development when overexpressed, and reduction in G867 gene expression causes early flowering (Hu et al., 2004).

[1192] Previously, we observed that G867 overexpression produced enhanced tolerance to high salt and sucrose levels. The aim of this study was to re-assess 35S::G867 lines and compare its overexpression effects to those of its paralogs. We also sought to test whether use of a two-component overexpression system would produce any strengthening of the phenotype relative to the use of a 35S direct promoter-fusion.

[1193] Morphological Observations. Direct promoter fusion lines: Additional G867 overexpression lines have now been generated containing the 35S direct promoter fusion construct (P383). 35S::G867 plants displayed a number of pleiotropic and variable alterations in overall morphology relative to wild-type controls. Such developmental changes included a reduction in overall size and alterations in leaf orientation. In some lines, changes in leaf shape, flowering time and non-specific floral abnormalities that reduced fertility were observed. A number of the lines (#5, 6, 8), were also re-examined, and were found to display similar phenotypes to that observed previously. Details of lines are shown below:

[1194] T1 lines 301-320: all lines appeared slightly reduced in size and #304, 310, 316, 318 showed abnormalities in rosette leaf orientation.

[1195] T2-305: all were rather small, marginally early flowering, had rather narrow leaves, and show floral abnormalities (flowers fail to properly open).

[1196] T2-306: all were rather small, marginally early flowering, had rather narrow leaves, and show floral abnormalities (flowers fail to properly open).

[1197] T2-309: all were small, had narrow, upward oriented leaves, and showed abnormal flowers.

[1198] T2-310: 3/6 wild-type, 1/6 dwarfed and infertile, 2/6 early flowering but otherwise wild type.

[1199] T2-312; all appeared wild type.

[1200] T3-5: all plants were distinctly smaller than controls, slightly pale and have narrow leaves.

[1201] T3-6: all plants were distinctly smaller than controls, and 4/7 were tiny, dark in color, and perished early in development.

[1202] T3-8: 2/7 plants examined were tiny and died at early stages of development, 5/7 were distinctly small.

[1203] 2-Component Lines

[1204] Further G867 overexpression lines (1621-1640) were produced using the two component vector system (P7140, P6506). These plants showed comparable phenotypes to those seen in the direct fusion lines and were small, slow developing and showed alterations in leaf shape and orientation.

[1205] T1 lines 1621-1640: all are small, pale, and slow developing to various extents. Some lines show alterations in leaf orientation.

[1206] T2-1622: all slightly small.

[1207] T2-1626: all slightly small and were slow developing at early stages.

[1208] T2-1633: 3/6 slightly small and slow developing. Others appeared wild type.

[1209] Physiology (Plate assays) Results. 35S::G867 lines had previously been shown to exhibit increased seedling vigor in germination assays on both high salt and high sucrose media compared to wild-type controls. We confirmed these data using both direct promoter fusion and two component systems and extended the positive results to include insensitivity to ABA in a germination assay (as opposed to ABA sensitive wild-type plants). Furthermore, several lines had better growth than wild-type plants in a chilling growth assay. However, several lines had small and chlorotic seedlings and showed a low germination efficiency. A number of lines also exhibited increased root hair density.

[1210] Discussion. We have now examined an additional set of 35S::G867 direct promoter-fusion lines. Overall, 35S::G867 causes a number of morphological phenotypes, including a reduction in overall size, alterations in leaf shape and orientation (which potentially indicated a disruption in circadian control), slow growth, and floral abnormalities relative to controls. Both direct fusion and two-component lines have been generated and assayed for drought related stress tolerance.

[1211] It should be emphasized that we have obtained comparable developmental effects as well as a strong enhancement of drought related stress tolerance in overexpression lines for the all three of the paralogs; G9, G1930 and G993. The almost identical phenotypic effects observed for the four genes strongly indicate that they are functionally equivalent.

[1212] Potential applications. Based on the results of our overexpression studies, G867 and its related homologs are excellent candidate genes for improvement of drought related stress tolerance in commercial species. However, the morphological effects associated with their overexpression, suggests that tissue-specific or conditional promoters might be required to optimize the utility of these genes.

G867 (SEQ ID NO: 87 and 88; Arabidopsis thaliana)—Vascular SUC2

[1213] Background. The aim of this project is to determine whether expression of G867 from a SUC2 promoter, which predominantly drives expression in a vascular specific pattern, is sufficient to confer stress tolerance that is similar to, or better than, that seen in 35S::G867 lines. We also wish to assess whether use of the SUC2 promoter could eliminate some of the undesirable morphologies associated with G867 overexpression, while still conferring enhanced stress tolerance.

[1214] Morphological Observations. Two-component lines have been obtained (#381-400) for which an opLexA::G867 construct was supertransformed into a SUC2::LexA-GAL4TA promoter driver line (#6). These lines appeared wild type at all developmental stages. However, it should be noted that the promoter driver line (#6) used in this set of lines, produced relatively low expression levels.

[1215] A direct promoter-fusion construct (P21521) for SUC2::G867 was also available. Fourteen lines (#1581-1594) harboring this construct also showed no consistent differences to wild-type controls.

[1216] A number of populations from both the 2-component (3 lines) and direct fusion (6 lines) were examined in the T2 generation, as indicated in the table below. These plants showed no consistent differences to wild-type, except for plants from the T2-1583 population, some of which were found to be small and exhibit early senescence. This phenotype was not recorded in other lines or in T2-1583 plants grown for the soil drought assay.

[1217] Physiology (Plate assays) Results. Seven out of ten SUC2::G867 (2-component) lines were more tolerant to sodium chloride in a germination assay. Four of these seven SUC2::G867 lines also performed better in a sucrose germination assay.

[1218] Positive results were also obtained with SUC2::G867 direct fusion lines. Three of ten direct fusion SUC2::G867 lines performed well in the sucrose germination assay. Six of ten direct fusion SUC2::G867 lines were more tolerant to ABA than wild type. In addition, five of these six direct fusion lines perform better than wild type in response to severe dehydration.

[1219] Physiology (Soil Drought—Clay Pot) Summary. Overall, SUC2::G867 lines showed an enhanced performance in soil drought assays.

[1220] Three 2-component lines were tested in a single run of a “split pot” assay (line and control plants together in same pot). Two of the three lines (#385, 388) exhibited significantly better survival than controls.

[1221] Six different SUC2::G867 direct fusion lines were also tested in “whole pot” soil drought assays. Two of these lines (1592 and 1583) each showed better survival than wild type on a single plant date.

TABLE 57
SUC2::G867 drought assay results:

| | | | | | p-value for | | | |
|---|---|---|---|---|---|---|---|---|
| | | | Mean | Mean | drought | Mean | Mean | p-value for |
| | Project | | drought | drought | score | survival | survival for | difference in |
| Line | Type | Assay type | score line | score control | difference | for line | control | survival |
| 1583 | DPF | Whole pot | 2.3 | 0.70 | 0.0051* | 0.34 | 0.14 | 0.00012* |
| 1583 | DPF | Whole pot | 2.3 | 2.1 | 0.60 | 0.42 | 0.48 | 0.34 |
| 1592 | DPF | Whole pot | 1.7 | 1.2 | 0.17 | 0.22 | 0.22 | 0.91 |
| 1592 | DPF | Whole pot | 2.1 | 1.0 | 0.12 | 0.43 | 0.28 | 0.010* |
| 385 | TCST | Split pot | 1.3 | 0.75 | 0.095* | 0.19 | 0.11 | 0.059* |
| 388 | TCST | Split pot | 1.5 | 0.33 | 0.041* | 0.21 | 0.048 | 0.041* |

DPF = direct promoter fusion project
TCST = Two component super transformation project
Survival = proportion of plants in each pot that survived
Drought scale: 6 (highest score) = no stress symptoms, 0 (lowest score; most severe effect) = extreme stress symptoms
*line performed better than control (significant at P < 0.11)

[1222] Discussion. We have isolated SUC2::G867 lines via both a direct-promoter fusion approach and a 2-component approach.

[1223] The physiological effects of SUC2::G867 in stress assays were comparable, but perhaps slightly weaker, than those shown by 35S::G867 plants.

[1224] Importantly, it should be noted that in contrast to the phenotype seen in 35S::G867 transformants, which showed a variety of undesirable morphological effects, SUC2::G867 lines displayed no obvious developmental abnormalities. Thus, the SUC2 promoter rather than the CaMV 35S promoter might alleviate such problems.

[1225] Potential applications. Given the undesirable morphologies that arise from G867 overexpression, it might be helpful to optimize G867 expression in plants by use of alternative promoters or sequence modifications. The results of this experiment indicate that use of the SUC2 promoter may be a good means to achieve this.

G867 (SEQ ID NO: 87 and 88; Arabidopsis thaliana)—Root ARSK1

[1226] Background. The aim of this project is to determine whether expression of G867 from an ARSK1 promoter, which drives expression in a root specific pattern, is sufficient to confer stress tolerance that is similar to, or better than, that seen in 35S::G867 lines. We also wish to assess whether use of a root specific promoter can eliminate some of the undesirable morphologies associated with G867 overexpression, while still conferring enhanced stress tolerance.

[1227] Morphological Observations. ARSK1::G867 lines exhibited no consistent changes in morphology versus wild-type controls.

[1228] Two Batches of 2-Component Lines Obtained:

[1229] T1 lines 1681-1689; at early stages, most of these plants were distinctly smaller than controls. However, at later stages, they appeared wild type.

[1230] T1 lines 1741-1748; some size variation was noted at early stages, but otherwise the plants appeared wild type.

[1231] T2 lines 1741, 1744 and 1748; wild-type at all developmental stages.

[1232] Direct promoter-fusion lines: To confirm the effects of ARSK1 with G867, we also obtained lines harboring a direct promoter-fusion construct. Twenty lines were obtained (1901-1920) and these plants showed no consistent differences to wild-type controls.

[1233] Physiology (Plate assays) Results. Three ARSK1::G867 lines were insensitive to ABA in a germination assay.

[1234] Physiology (Soil Drought-Clay Pot) Summary. Data from assays run so far indicate that the ARSK1::G867 combination affords significant drought tolerance relative to controls. Three independent lines were tested on each of three different plant dates. Lines 1744 and 1748 both showed a better performance than controls on two of the dates and a comparable performance to controls on the third date. Line 1741 showed a better performance than controls on one date and a wild-type performance on two other dates

TABLE 58
ARSK1::G867 drought assay results:

| | | Mean | Mean | p-value for | Mean | Mean | p-value for |
|---|---|---|---|---|---|---|---|
| | Project | drought | drought score | drought score | survival for | survival for | difference in |
| Line | Type | score line | control | difference | line | control | survival |
| 1741 | TCST | 1.8 | 0.33 | 0.017* | 0.26 | 0.056 | 0.000098* |
| 1741 | TCST | 0.90 | 0.50 | 0.22 | 0.26 | 0.26 | 1.0 |
| 1741 | TCST | 1.2 | 0.80 | 0.12 | 0.14 | 0.17 | 0.51 |
| 1744 | TCST | 1.3 | 0.33 | 0.095* | 0.26 | 0.056 | 0.000098* |
| 1744 | TCST | 2.1 | 1.8 | 0.45 | 0.50 | 0.50 | 0.95 |
| 1744 | TCST | 1.8 | 1.1 | 0.024* | 0.38 | 0.34 | 0.45 |
| 1748 | TCST | 1.3 | 0.33 | 0.032* | 0.26 | 0.056 | 0.00060* |
| 1748 | TCST | 1.9 | 1.2 | 0.024* | 0.45 | 0.37 | 0.16 |
| 1748 | TCST | 1.2 | 1.0 | 0.52 | 0.24 | 0.24 | 0.92 |

TCST = Two component super transformation project
Survival = proportion of plants in each pot that survived
Drought scale: 6 (highest score) = no stress symptoms, 0 (lowest score; most severe effect) = extreme stress symptoms
*line performed better than control (significant at P < 0.11)

[1235] Discussion. We have generated a number of ARSK1::G867 lines using a two-component approach, and these lines appeared to have wild-type morphology. Wild-type morphology was also seen in ARSK1::G867 direct fusion lines. These results contrast the effects of 35S overexpression of G867, which produces a marked reduction in overall size and other developmental abnormalities (see 35S::G867 report). It appears that targeting G867 expression to the roots can retain a number of desirable drought-tolerance related phenotypes, while eliminating the undesirable shoot morphology apparent in the 35S::G867 lines.

[1236] Potential applications. Based on the data from overexpression studies, G867 is a good candidate gene for improving stress tolerance in commercial species. However, given the undesirable morphologies that arise from G867 overexpression, it may be helpful to optimize the gene by use of alternative promoters or sequence modifications before it can be used to develop products. The results of this experiment indicate that use of the ARSK1 promoter may be a good way to achieve this.

G867 (SEQ ID NO: 87 and 88; Arabidopsis thaliana)—Stress Inducible RD29A—Line 2

[1237] Background. A two component approach was used for these studies and two different RD29A::LexA promoter driver lines were established: line 2 and line 5. Line 2 had a higher level of background expression than line 5, and thereby is expected to provide somewhat different regulation. Line 2 was observed to have constitutive basal expression of GFP, and to have a marked increase in GFP expression following the onset of stress. In contrast, line 5 exhibited very low background expression, although it still exhibited an up-regulation of expression following the onset of stress. However, the stress-induced levels of GFP expression observed in line 5 were lower than those observed for line 2.

[1238] Morphological Observations. Two batches of supertransformants for opLexA::G867 into the RD29A_line2::LexA promoter background were obtained (1381-1398; 1561-1567). Most of the primary transformants were smaller than controls, to varying extents, but in other respects, showed wild-type morphology.

[1239] Line Details:

[1240] Lines 1381-1398: all lines were slightly small except for 6/19 lines (1383, 1389, 1391, 1392, 1384, 1393) which were tiny.

[1241] Four T2 populations from this set of lines were later examined (see table below). Plants from each of these T2 showed no consistent differences in morphology to wild-type controls.

[1242] Lines 1561-1567: at early stages, all appeared wild type, but at late stages all were noticeably smaller than wild type.

[1243] Physiology (Plate assays) Results. Four RD29A::G867 lines (2-component in the line 2 promoter background) out of ten performed well in a germination assay in the presence of sodium chloride.

[1244] Physiology (Soil Drought-Clay Pot) Summary. Four independent G867 (2-component) lines in the RD29A line 2 promoter background were each tested in a single run of the split pot soil drought assay. One of these lines (#1391) showed a significantly better performance than controls.

TABLE 59
RD29A::G867 drought assay results:

| | | Mean | Mean | p-value for | Mean | Mean | p-value for |
|---|---|---|---|---|---|---|---|
| | Project | drought | drought score | drought score | survival for | survival for | difference in |
| Line | Type | score line | control | difference | line | control | survival |
| 1391 | TCST | 0.83 | 0.25 | 0.042* | 0.26 | 0.12 | 0.0092* |

TCST = Two component super transformation project
Survival = proportion of plants in each pot that survived
Drought scale: 6 (highest score) = no stress symptoms, 0 (lowest score; most severe effect) = extreme stress symptoms
*line performed better than control (significant at P < 0.11)

[1245] Discussion. The majority of the RD29A::LexA;opLexA::G867 lines were slightly smaller than controls, but in other respects exhibited wild-type morphology. Thus, the low constitutive expression produced by the driver line could have triggered such reduced size effects. The reduction in size seen in these lines was generally less severe than that seen in the 35S::G867 lines.

[1246] Potential applications. G867 in combination with a stress inducible promoter appears to confer moderate drought tolerance and only moderate morphological defects (small size) compared to the 35S::G867 lines, indicating that this may be a potential way to achieve stress tolerance while minimizing undesirable morphologies.

G867 (SEQ ID NO: 87 and 88; Arabidopsis thaliana)—Stress Inducible RD29A—Line 5

[1247] Morphological Observations. Supertransformants for opLexA::G867 into the RD29A_line5::LexA promoter background showed no consistent differences in morphology to controls.

[1248] A total of thirty-five lines have been obtained, in two different batches: (#1401-1418 and 1461-1477). Two lines were very small (#1402 and 1464), but the remainder were wild type. Plants from two T2 populations were also examined and appeared wild type.

[1249] Physiology (Plate assays) Results. Three of ten RD29A::G867 lines performed better than wild-type seedlings in a germination assay in the presence of sodium chloride (one line performed substantially better than controls).

[1250] Physiology (Soil Drought-Clay Pot) Summary. One line (line 1466) comprising an opLexA::G867 transgene transformed into the RD29A line 5 promoter background recovered from drought better than controls in soil-based assays.) on one plant date.

TABLE 60
RD29A::G867 drought assay results:

| | | Mean | Mean | p-value for | Mean | Mean | p-value for |
|---|---|---|---|---|---|---|---|
| | Project | drought | drought score | drought score | survival for | survival for | difference in |
| Line | Type | score line | control | difference | line | control | survival |
| 1466 | TCST | 0.60 | 0.10 | 0.28 | 0.20 | 0.19 | 0.88 |
| 1466 | TCST | 0.60 | 0.10 | 0.28 | 0.11 | 0.029 | 0.0098* |

TCST = Two component super transformation project
Survival = proportion of plants in each pot that survived
Drought scale: 6 (highest score) = no stress symptoms, 0 (lowest score; most severe effect) = extreme stress symptoms
*line performed better than control (significant at P < 0.11)

[1251] Discussion. We have now established two component (RD29A::LexA;opLexA::G867) lines in the RD29A line 5 background. These lines showed no consistent differences in morphology to controls. This result contrasts the effects of 35S overexpression of G867, which produces a marked reduction in overall size and other developmental abnormalities (i.e., as compared to 35S::G867 lines).

[1252] Potential applications. This experiment indicates that G867 in combination with a stress inducible promoter may effect drought-related abiotic stress tolerance, while reducing undesirable morphological effects associated with constitutive overexpression of the gene. However, it should be noted that the stress tolerance phenotypes obtained with RD29A were less compelling than those obtained with the 35S::G867 lines.

G867 (SEQ ID NO: 87 and 88; Arabidopsis thaliana col)—Leaf RBCS3

[1253] Background. The aim of this project is to determine whether expression of G867 from a RBCS3 promoter, which predominantly drives expression in photosynthetic tissue, is sufficient to confer stress tolerance that is similar to, or better than, that seen in 35S::G867 lines, while eliminating some of the undesirable morphologies associated with constitutive G867 overexpression.

[1254] Morphological Observations. Arabidopsis lines in which G867 was expressed from the RBCS3 promoter (using the two component system) exhibited no consistent alterations in growth and development. The majority of plants showed wild-type morphology, though a number of RBCS3::G867 lines were noted to have a slight reduction in overall size. In general, the effects seen were less severe that those obtained with 35S::G867 lines.

[1255] T1 lines generally appeared wild type at all developmental stages. Some size variation was apparent at the rosette stage, with some plants being small to varying extents. Four lines developed slowly, had slightly contorted leaves, and bolted slightly later than controls.

[1256] Three T2 lines were examined; plants in each of these populations displayed a wild-type phenotype.

[1257] Physiology (Plate assays) Results. Four RBCS3::G867 lines out of ten performed better than wild-type seedlings in a germination assay in the presence of sodium chloride.

[1258] Discussion. We have isolated RBCS3::G867 lines via a 2-component approach. The RBCS3 lines were tested in drought related assays; moderate salt tolerance was seen in plate-based assays, but no clear advantage over controls was observed in soil based clay pot assays

[1259] Potential applications. Based on the data from overexpression studies, G867 is a good candidate gene for improving stress tolerance in commercial species. However, given the undesirable morphologies that arise from G867 overexpression (see the 35S::G867 report), it might be necessary to optimize the gene by use of alternative promoters or sequence modifications before it can be used to develop products. The results of this experiment indicate that use of the RBCS3 promoter may be a potential means to achieve this. The stress tolerance phenotypes obtained with this construct were less compelling than with the 35S::G867 combination.

G867 (SEQ ID NO: 87 and 88; Arabidopsis thaliana)—Super Activation (N-GAL4-TA)

[1260] Background. The aim of this project was to determine whether the efficacy of the G867 protein could be improved by addition of an artificial GAL4 activation domain.

[1261] Morphological Observations. Overexpression of a super-active form of G867, comprising a GAL4 transactivation domain fused to the N terminus of the protein, produced no consistent effects on Arabidopsis morphology.

[1262] Two batches of lines containing construct P21201 have were obtained: lines 981-991 and 1141-1160. The majority of these T1 lines and each of three T2 populations appeared wild type at all developmental stages.

[1263] Physiology (Plate assays) Results. Four out of ten 35S::GAL4-G867 lines were more tolerant to sodium chloride than controls in a germination assay.

[1264] Physiology (Soil Drought-Clay Pot) Summary. Three independent 35S::GAL4-G867 lines were tested in soil drought assays.

[1265] A single line #981 showed significantly better survival than controls in a single run of a split pot assay and in a first run of a whole pot assay. In a second run of the whole pot assay, the line showed a comparable response to wild type.

[1266] A second line #987 showed a wild-type performance in the split pot assay and inconsistent results in the whole pot assay. In one planting, this line performed substantially better than controls, but in a subsequent planting, where the plants suffered a harsher drought treatment, line #987 showed a worse performance than controls.

[1267] The third line #1148, performed worse in two repeats of the whole pot assay and showed a wild-type response in the split pot assay.

TABLE 61
35S::GAL4-G867 drought assay results:

| | | Mean | | p-value for | Mean | Mean | |
|---|---|---|---|---|---|---|---|
| | Project | drought | Mean drought | drought score | survival | survival | p-value for difference in |
| Line | Type | score line | score control | difference | for line | for control | survival |
| 981 | GAL4 | 0.60 | 0.60 | 0.90 | 0.19 | 0.14 | 0.26 |
| | N-term | | | | | | |
| 981 | GAL4 | 1.0 | 0.40 | 0.092* | 0.77 | 0.17 | 0.000000000000000000027* |
| | N-term | | | | | | |
| 981 | GAL4 | 0.58 | 0.17 | 0.089* | 0.11 | 0.048 | 0.089* |
| | N-term | | | | | | |

Survival = proportion of plants in each pot that survived
Drought scale: 6 (highest score) = no stress symptoms, 0 (lowest score; most severe effect) = extreme stress symptoms
*line performed better than control (significant at P < 0.11)

[1268] Discussion. We have isolated lines that overexpress a version of the G867 protein that has a GAL4 activation domain fused to the N terminus. These transformants showed no consistent differences in morphology compared to wild type controls. This result contrasts the effects of overexpression of the wild-type form of the G867 protein, as well as with the C-terminal GAL4 fusion, which both produced a marked reduction in overall size and other developmental abnormalities (i.e., as compared with 35S::G867 and G867 C-terminal fusions).

[1269] Potential applications. Based on the data from overexpression studies, G867 is a good candidate gene for improving stress tolerance in commercial species. However, given the undesirable morphologies that arise from G867 overexpression (i.e., as compared to 35S::G867 lines), it might be necessary to optimize the gene by use of alternative promoters or sequence modifications before it can be used to develop products. The morphology and physiology results from this experiment indicate addition of an artificial activation domain at the N-terminus may be one such modification. However, the levels of stress tolerance obtained with the GAL4-G867 fusion did not appear better than those conferred by the native form of the protein

G867 (SEQ ID NO: 87 and 88; Arabidopsis thaliana)—Super Activation (C-GAL4-TA)

[1270] Background. The aim of this project was to determine whether the efficacy of the G867 protein could be improved by addition of an artificial GAL4 activation domain.

[1271] Morphological Observations. Overexpression of a super-active form of G867, comprising a GAL4 transactivation domain fused to the C terminus of the protein, produced complex effects on Arabidopsis morphology.

[1272] Two batches of lines containing construct P21193 were obtained: 521-531 and 641-645. The majority of these plants appeared wild type. However, a number of lines (522, 523, and 525) from the first batch were noted to be small at early stages of development, while the second batch all appeared wild type. Previously, we concluded that overexpression of this construct yielded no consistent effects on morphology. However, on examining three T2 populations, a more distinct (but pleiotropic) phenotype became apparent.

[1273] T2-523: all plants were small at early stages, had rather shiny leaves, showed an acceleration in the onset of flowering, had rather bushy inflorescences, and floral abnormalities.

[1274] T2-525; 2/6 plants slightly large at early stages and grew more rapidly than controls. 4/6 rather small and slow developing.

[1275] T2-528: all plants small, slightly dark with shiny leaves. 3/6 flowered slightly early. Floral abnormalities and poor fertility were apparent.

[1276] Physiology (Plate assays) Results. Three of ten 35S::G867-GAL4 lines performed better than wild-type on plates containing sucrose in a germination assay. Two of these lines were also less sensitive to ABA in another germination assay, and three lines showed enhanced performance in a chilling growth assay. Two lines were also small and pale.

[1277] Discussion. We have isolated lines that overexpress a version of the G867 protein that has a GAL4 activation domain fused to the C terminus. Three of the ten lines were substantially more resistant to sucrose in germination assays than controls. The same three lines also out-performed wild type to varying extents in germination assays on ABA and in growth assays under cold conditions. Interestingly, though, these three lines performed worse than controls in clay pot soil drought assays. These same three lines were smaller and darker than wild-type controls, showed altered flowering time and had mild fertility problems. Such effects were very similar to those seen in 35S::G867 lines. The remaining seven lines, however, displayed a wild-type response in plate-based assays. A number of these transformants showed a slight reduction in size, but the majority showed no consistent differences in morphology compared to wild type controls. This result contrasts the effects of overexpression of the wild-type form of the G867 protein, which produces a marked reduction in overall size and other developmental abnormalities.

[1278] It appears that while the additional domain added at the C-terminus reduces deleterious phenotypes associated with overexpression of G867, stress resistance phenotypes are also seen at lower frequency in these 35S::G867-GAL4 lines (e.g., as compared to the non-modified 35S::G867, where all of the lines tested showed abiotic stress resistance.

[1279] Potential applications. Based on the data from overexpression studies, G867 is a good candidate gene for improving stress tolerance in commercial species. However, given the undesirable morphologies that arise from G867 overexpression, it might be necessary to optimize the gene by use of alternative promoters or sequence modifications before it can be used to develop products. The results of this experiment suggest addition of an artificial activation domain at the C-terminus does not offer any consistent improvement relative to the native form of the protein.

G867 (SEQ ID NO: 87 and 88; Arabidopsis thaliana)—Deletion Variant

[1280] Background. The aim of this project was to further refine our understanding of G867 function by use of a dominant negative approach in which a truncated version of the protein was overexpressed. Two constructs were built; one of these overexpressed a short version of the G867 protein comprising the AP2 domain, whereas the other was a truncated version comprising the B3 domain, but not the AP2 domain.

[1281] Morphological Observations. Lines have been obtained for each of two different G867 deletion constructs: P21275 and P21276.

[1282] Lines 1041-1060 and 1441-1460 were transformed with P21275, a construct in which a truncated version of G867 comprising the AP2 domain was overexpressed. Plants harboring this construct exhibited no consistent differences in morphology to wild-type controls.

[1283] Lines 881-889, lines 1001-1016, and lines 1361-1380 contained P21276, a construct in which a truncated version of G867 containing the B3 domain, but not the AP2 domain, was overexpressed. Plants from each of these three sets of lines showed a number pleiotropic but distinct alterations in morphology. The plants generally formed narrow strap like leaves, were slightly reduced in overall size, had reductions in trichome density, showed increased activity of secondary shoot meristems (in the primary rosette leaf axils), and had abnormalities in shoot phyllotaxy. Some of the lines were also noted to flower early and develop rather more rapidly than wild type.

[1284] The above phenotypes were observed to varying extents in 6/9 lines from the 881-889 set: (#884, 885, 886, 887, 888, 889), 16/16 lines from the 1001-1016 set, and 19/20 lines (all except #1371) from the 1361-1380 set. Two T2 lines (T2-881 and T2-889, T2-1002) were also examined; plants from each of these populations were early flowering and formed rather bushy stems.

[1285] Physiology (Plate assays) Results. Two different G867 deletion constructs (P21275 and P21276) have been analyzed in abiotic stress assays.

[1286] Lines 886 to 1014 contained P21276, a construct in which a truncated version of G867 containing the B3 domain, but not the AP2 domain, was overexpressed. Three lines were more tolerant to cold stress during germination.

[1287] Lines 1041 to 1060 and 1441-1460 were transformed with P21275, a construct in which a truncated version of G867 comprising the AP2 domain was overexpressed. Five of twenty lines were more tolerant compared with wild-type plants in a growth assay in the presence of chilling temperatures. Four of the twenty lines performed better than controls in a severe dehydration assay.

[1288] Discussion. We have now isolated lines harboring each of the G867 dominant negative constructs. Lines containing the construct for overexpression of the AP2 domain exhibited wild-type morphology. This contrasts the effects of overexpressing the full-length G867 protein, which causes a number of undesirable morphological changes. Thus, the regions of the G867 protein that cause undesirable morphologies are potentially external to the AP2 domain itself.

[1289] Lines carrying the other construct, expressing a truncated form of the protein containing the B3 domain, showed a variety of morphological alterations including changes in phyllotaxy, leaf shape, overall size, and flowering time. Such pleiotropic effects are rather difficult to interpret, but suggest that G867 can impact a range of developmental processes. In particular, some of the lines showed a reduction in trichome density, indicating that G867 can affect the genetic pathways that specify trichome development.

[1290] Physiological assays have been performed on lines carrying each of the two constructs. Neither type of line performed differently than controls in soil-based drought tolerance assays. Plate-based assays indicate that both types of construct confer moderate cold tolerance, either in germination or growth.

[1291] Potential applications. The morphological changes seen in dominant negative lines overexpressing the B3 domain indicate that G867 can be used to manipulate various aspects of plant development. In particular, the gene may be used to modify trichome formation. Such structures have a variety of roles and in some species accumulate potentially valuable secondary metabolites. In other cases trichomes are thought to offer protection against water loss or insect attack. These dominant negative lines may also be used to confer cold tolerance.

G867 (SEQ ID NO: 87 and 88; Arabidopsis thaliana)—RNAi (clade)

[1292] Background. The aim of this project was to further refine our understanding of G867 function by use of an RNAi approach; two constructs (see sequence section) were generated that were targeted towards reducing activity of all members of the G867 clade. Given that the different members of the G867 clade are potentially functionally redundant, it was thought that this method could reveal phenotypes that might not be visible in single KO lines for the individual clade members.

[1293] Morphological Observations. Lines for two different G867-RNAi (clade) constructs have been examined. Some evidence of delayed flowering and increased rosette size was apparent, but these phenotypes were obtained at a relatively low frequency.

[1294] Line Details:

[1295] (N.B. P21303 and P21304 were different constructs. P21162, however, was identical to P21303. See sequence section for details.)

[1296] P21303 and P21162 Lines:

[1297] T1 lines 421-429: all were slightly small at early stages. 2/9 lines (422, 426) were rather late flowering.

[1298] T2-422, T2-426, T2-427: all appeared wild type.

[1299] T1 lines 1201-1217. 3/17 (1202, 1203, 1205) developed large rosettes with long leaves and petioles were slightly late flowering. Others appeared wild type.

[1300] T2-1202: all were slightly late flowering.

[1301] T2-1203, T2-1205: all appeared wild type.

[1302] T1 lines 1661-1680: some size variation, with many lines being slightly small at early stages. 3/20 lines were rather late developing versus controls. Others appeared wild type at later stages.

[1303] T2-1674: all appeared wild type.

[1304] T2-1673: all had slightly large rosettes at late stages.

[1305] T2-1665: all were slightly large at the rosette stage.

[1306] P21304 Lines:

[1307] T1 lines 1221-1240: no consistent differences to controls.

[1308] T2-1240: all appeared wild type.

[1309] T2-1239: 2/6 showed slightly enlarged rosettes, 4/6 were wild type.

[1310] T2-1235: 2/6 showed slightly enlarged rosettes, 4/6 were wild type.

[1311] Physiology (Plate assays) Results. Lines for two different G867-RNAi (clade) constructs were tested in plate based assays. Overall, although sporadic “hits” were obtained in some of the assays, lines for either of these constructs showed no consistent differences in performance relative to controls under stress conditions.

[1312] A number of the lines carrying P21303, however, were noted to be larger and more vigorous at the seedling stage relative to controls.

[1313] (N.B. P21303 and P21304 were different constructs. P21162, however, was identical to P21303.

[1314] Physiology (Soil Drought-Clay Pot) Summary. Lines for two different G867-RNAi (clade) constructs were tested in soil drought assays.

[1315] Two of three lines harboring P21162 showed an enhanced survival relative to controls in a single run of a split pot soil drought assay (lines and control together in same pot).

[1316] Three lines for another construct (P21304) were also tested in a split pot assay. All of these lines showed a comparable rate of survival versus wild-type, but one lines showed less severe stress symptoms versus the control at the end of the drought period.

TABLE 62
G867-RNAi (clade) drought assay results:

| | | | Mean | Mean | | | | |
|---|---|---|---|---|---|---|---|---|
| | | | drought | drought | p-value for | Mean | Mean | p-value for |
| | | | score | score | drought score | survival | survival for | difference |
| PID | Line | Project Type | line | control | difference | for line | control | in survival |
| P21162 | 422 | RNAi (clade) | 1.6 | 1.6 | 1.0 | 0.23 | 0.29 | 0.47 |
| P21162 | 426 | RNAi (clade) | 2.0 | 2.0 | 1.0 | 0.29 | 0.15 | 0.041* |
| P21162 | 427 | RNAi (clade) | 2.8 | 2.8 | 1.0 | 0.39 | 0.19 | 0.0049* |

Survival = proportion of plants in each pot that survived
Drought scale: 6 (highest score) = no stress symptoms, 0 (lowest score; most severe effect) = extreme stress symptoms
*line performed better than control (significant at P < 0.11)

[1317] Discussion. We have now isolated lines harboring each of the G867 RNAi clade constructs. The plants displayed some changes in morphology, at low frequency, relative to wild-type controls, including alterations in plant size and flowering time. Two lines survived drought better than controls in soil drought assays. One of these lines (#426) was more tolerant to salt in plate-based assays, and second line (#427), was more tolerant to severe dehydration and grew better than controls in plate-based assays.

[1318] Potential applications. Based on the data from overexpression studies, G867 is a good candidate for improving stress tolerance in commercial species. However, this RNAi project has not provided much additional insight into the native role of the G867 clade. The results do indicate, though, that a knock-down approach on the G867 related genes can be used as a means to enhance stress tolerance and modify developmental processes.

G9 (SEQ ID NO: 105 and 106; Arabidopsis thaliana)—Constitutive 35S

[1319] Background, G9 is a paralog of G867, and has been referenced in the public literature as RAP2.8 and RAV2 (Okamuro et al., 1997; Kagaya et al., 1999). G9 has been reported as a putative ABA agonist in maize protoplasts (Gampala et al. 2004). Previously, we observed that G9 overexpression enhanced root growth. The aim of this study was to re-assess 35S::G9 lines and determine whether overexpression of the gene could confer enhanced stress tolerance in a comparable manner to G867. We also sought to test whether use of a two-component overexpression system would produce any strengthening of the phenotype relative to the use of a 35S direct promoter-fusion.

[1320] Morphological Observations. G9 overexpression lines were generated containing the 35S direct promoter fusion construct (P167, lines 301-318), and via the two component system (6506, P7824, lines 461-473). Both these batches of 35S::G9 lines displayed a number of pleiotropic and variable alterations in overall morphology relative to wild-type controls. Such developmental changes included a reduction in overall size and alterations in leaf orientation. In some lines, changes in leaf shape, flowering time and non-specific floral abnormalities that reduced fertility were observed. Details of lines are shown below:

[1321] Direct fusion lines were generally smaller than controls with had narrow leaves and a reduction in rosette biomass. Some plants showed poor fertility and set very few siliques.

[1322] Three T2 lines were morphologically examined:

[1323] These plants were smaller than controls (in some cases, the difference was slight), slow developing, late bolting, had vertically oriented leaves and showed floral abnormalities.

[1324] T2-304: 6/6 were slightly small and showed delayed bolting.

[1325] Two component lines were small and showed vertically oriented leaves and slow growth relative to wild type. A number of plants were late developing.

[1326] Physiology (Plate assays) Results. 35S::G9 lines showed more root growth on control plates compared to wild-type control seedlings. When seedlings of ten new (direct fusion) lines overexpressing G9 were analyzed, increased tolerance to salt was observed in all ten lines. Several lines were also less sensitive to ABA and sucrose in separate germination assays. Tolerance to cold conditions was also observed in a growth assay under chilling conditions. Seedlings from some lines were also small and chlorotic. However, enhanced root growth was not observed on control plates, in this set of lines.

[1327] Tolerance to salt, sucrose and ABA was also seen when a two component expression system was used to drive the constitutive overexpression of G9. However, enhanced root hair production was noted in a few lines, in contrast to the results seen with the most recent set of direct promoter fusion lines.

[1328] Discussion. New overexpression lines have been obtained using both a direct promoter fusion construct and a two component expression system. Lines generated by either of these methods exhibited similar phenotypes and displayed a number of morphological effects that had not been observed during our earlier genomics screens. These included a reduction in overall size, alterations in leaf orientation (which potentially indicated a disruption in circadian control), slow growth, and floral abnormalities relative to controls.

[1329] It should be emphasized that we have obtained comparable developmental effects as well as a strong enhancement of abiotic stress tolerance from all four of the Arabidopsis genes in the G867 study group (G9, G867, G993, and G1930). The almost identical phenotypic effects produced by these genes strongly indicate that they are functionally equivalent.

[1330] Potential applications. Based on the results of our overexpression studies, G9 and its related paralogs are excellent candidate genes for improvement of abiotic stress tolerance in commercial species. However, the morphological effects associated with their overexpression suggest that tissue-specific or conditional promoters might be required to optimize the utility of these genes.

G993 (SEQ ID NO: 89 and 90; Arabidopsis thaliana)—Constitutive 35S

[1331] Background. G993 is a paralog of G867. Previously, we observed that G993 overexpression lines exhibited a number of morphological abnormalities. The aim of this study was to re-assess 35S::G993 transformants using a greater number of lines and determine whether overexpression of the gene could confer enhanced stress tolerance in a comparable manner to G867.

[1332] Morphological Observations. Additional G993 overexpression lines have now been generated using both the two-component system and a direct fusion approach.

[1333] 35S::G993 plants displayed a number of pleiotropic and variable alterations in overall morphology relative to wild-type controls. Such developmental changes included a reduction in overall size, alterations in leaf shape, alternations in hypocotyl length and cotyledon orientation, slower growth, altered flowering time and non-specific floral abnormalities that reduced fertility were observed.

[1334] Direct promoter-fusion lines were generally small and slow developing, with floral abnormalities and poor fertility.

[1335] Two-component lines (generated using the two component vectors P6506 and P21149) showed particularly severe phenotypes; the majority were extremely dwarfed, dark, and slow developing, and yielded few if any seeds. Consequently, the 2-component lines could not be tested in physiology assays.

[1336] Physiology (Plate assays) Results. When seedlings overexpressing G993 were examined, eight of these lines gave positive stress tolerance phenotypes in one or more of the following assays: salt ( 6/10), sucrose 5/10), cold germination ( 3/10) or growth under chilling conditions ( 6/10).

[1337] Interestingly, two lines which did not show a positive result on the stress plates (#330 and #337) showed a dramatic increase in root hair density when grown on regular control MS plates.

[1338] Discussion. New overexpression lines have been obtained using both a two-component and a direct fusion approach. These lines exhibited similar phenotypes to those observed during our earlier genomics studies and were generally small, slow developing, and poorly fertile. Occasional lines also showed features that indicated a disruption in light regulated development, such as long hypocotyls and alterations in leaf orientation. Our attempts to generate 2-component overexpression lines resulted in dwarfed, dark, and slow developing plants, which were too infertile to produce enough seeds for physiological testing.

[1339] It should be emphasized that we have obtained comparable developmental effects as well as a strong enhancement of drought related stress tolerance in all four of the Arabidopsis genes in the G867 study group (G9, G867, G993, and G1930). The almost identical phenotypic effects produced by these genes strongly indicate that they are functionally equivalent.

[1340] Potential applications. Based on the results of our overexpression studies, G993 and its related paralogs are excellent candidate genes for improvement of drought related stress tolerance in commercial species. However, the morphological effects associated with their overexpression, suggests that tissue specific or conditional promoters might be required to optimize the utility of these genes.

[1341] Additionally, the increased root hair production seen in 35S::G993 lines indicates that the gene may be used to enhance root growth and differentiation and might thereby improve performance under other stresses, such as low nutrient availability.

G1930 (SEQ ID NO: 91 and 92; Arabidopsis thaliana)—Constitutive 35S

[1342] Background. G1930 is a paralog of G867. Previously, we observed that G1930 overexpression lines exhibited increased tolerance to sodium chloride, ABA, and sucrose. The plants also showed a number of morphological abnormalities. The aim of this study was to re-assess 35S::G1930 transformants using a greater number of lines and determine whether overexpression of the gene could confer enhanced stress tolerance in a comparable manner to G867. We also sought to test whether use of a two-component overexpression system would produce any strengthening of the phenotype relative to the use of a 35S direct promoter-fusion.

[1343] Morphological Observations. New sets of G1930 overexpression lines have now been generated, containing the 35S direct promoter fusion construct (P1310, lines 301-318, 361-371), and via the two component system (P6506, P3373, lines 321-340)

[1344] These batches of 35S:G1930 lines displayed a number of pleiotropic alterations in overall morphology relative to wild-type controls. Such developmental changes included a reduction in overall size and alterations in leaf orientation. In some lines, changes in leaf shape, hypocotyl length, trichome density, flowering time and non-specific floral abnormalities that reduced fertility were also observed. Details of lines are provided below:

[1345] Direct fusion lines were distinctly small with narrow leaves that were positioned in an upright manner. Some plants displayed abnormal flowers in which buds often fail to open. Some lines had reduced trichome density and showed poor fertility.

[1346] Two component lines were small and at the seedling stage showed rather long hypocotyls. A number of lines displayed vertically oriented leaves and bolted later than wild type. A number of lines displayed flowers that failed to properly open and were of poor fertility.

[1347] Physiology (Plate assays) Results. In the initial genomics program, G1930 overexpressors were more tolerant of osmotic stress conditions than controls. The plants responded to high NaCl and high sucrose on plates with more seedling vigor compared to wild-type control plants.

[1348] This observation was confirmed when seedlings of several lines overexpressing G1930 by direct promoter fusion were re-examined. Most of the lines tested were more tolerant to sodium chloride, sucrose in a germination assay, or tolerant to cold in a growth assay than controls. While many 2-component lines were tolerant to ABA during germination, none of the direct promoter fusion lines showed this tolerance.

[1349] Discussion. We generated additional 35S::G1930 lines via both the direct promoter-fusion and the 2-component methods. Both types of lines exhibited a variety of morphological phenotypes including reduced size, slow growth, and alterations in leaf orientation. In some lines, changes in leaf shape, hypocotyl length, trichome density, flowering time and non-specific floral abnormalities that reduced fertility were also observed.

[1350] It should be emphasized that we have obtained comparable developmental effects as well as a strong enhancement of drought related stress tolerance from all four of the Arabidopsis genes in the G867 study group (G9, G867, G993, and G1930). The almost identical phenotypic effects produced by these genes strongly indicate that they are functionally equivalent.

[1351] Potential applications. Based on the results of our overexpression studies, G1930 and its related paralogs are excellent candidate genes for improvement of abiotic stress tolerance in commercial species. However, the morphological effects associated with their overexpression, suggests that tissue specific or conditional promoters might be required to optimize the utility of these genes.

G3389 (SEQ ID NO: 103 and 104; Oryza sativa)—Constitutive 35S

[1352] Background. G3389 is a rice gene that is a closely-related homolog of G867. The aim of this project is to determine whether G3389 has an equivalent function to G867 via the analysis of 35S::G3389 Arabidopsis lines.

[1353] Morphological Observations. 35S::G3389 lines were obtained at relatively low frequency, a total of only five transformants were obtained from three different selection attempts. This suggests that the gene might be lethal when overexpressed at high levels.

[1354] In the T1 generation, all four of the five lines (#341, 342, 343, and 344) were early flowering and all of the lines except #342 were smaller than wild type. Two of the T1 plants (341 and 344 had rather bushy inflorescences). One of the lines (#345) was extremely tiny.

[1355] Four of the lines were then examined in the T2 generation; three of these populations appeared wild type, but plants from T2-341 displayed accelerated flowering and had bushy inflorescences, similar to what had been observed in the T1 generation.

[1356] Physiology (Plate assays) Results. All four lines had good performance in germination assays relative to controls in the presence of sodium chloride or cold temperatures. Two of these lines were tolerant to heat during growth assays.

[1357] Physiology (Soil Drought-Clay Pot) Summary. One 35S::G3389 line showed greater drought tolerance than wild type.

TABLE 63
35S::G3389 drought assay results:

| | | Mean | | p-value for | Mean | | p-value for |
|---|---|---|---|---|---|---|---|
| | Project | drought | Mean drought | drought score | survival for | Mean survival | difference in |
| Line | Type | score line | score control | difference | line | for control | survival |
| 341 | DPF | 1.5 | 0.78 | 0.068* | 0.13 | 0.13 | 0.93 |

DPF = direct promoter fusion
Survival = proportion of plants in each pot that survived
Drought scale: 6 (highest score) = no stress symptoms, 0 (lowest score; most severe effect) = extreme stress symptoms
*line performed better than control (significant at P < 0.11)

[1358] Discussion. In general, 35S::G3389 plants displayed comparable, but weaker developmental and stress tolerance effects to the 35S::G867 plants, indicating that this ortholog is at least partially functionally equivalent to the G867 study group in Arabidopsis. Relatively few transformants were obtained with multiple attempts, however, suggesting that the gene might be lethal when overexpressed at high levels.

[1359] Potential applications. Based on the results of our overexpression studies, G3389 is a candidate gene for improvement of abiotic stress tolerance in commercial species. However, the possible deleterious effects associated with high overexpression levels, suggest that tissue specific or conditional promoters might be required to optimize the utility of this gene. The changes in flowering time and morphology seen in 35S::G3389 lines indicate that this gene could be used to modify the floral transition and/or plant development.

G3391 (SEQ ID NO: 93 and 94; Oryza sativa)—Constitutive 35S

[1360] Background. G3391 is a rice gene that is a closely-related homolog of G867. The aim of this project was to determine whether G3391 has an equivalent function to G867 via the analysis of 35S::G3391 Arabidopsis lines.

[1361] Morphological Observations. Overexpression of G3391 produced a variety of pleiotropic morphological effects in Arabidopsis. 35S::G3391 lines were distinctly small and showed alterations in leaf shape, leaf orientation, flowering time, and floral defects that resulted in poor fertility. Three sets of lines were obtained, as detailed below:

[1362] Lines 321-335: all T1 lines were markedly small, with narrow pointed leaves. #321, 328, 335 were tiny and perished at early stages. #322, 323, 327, 329, 332, 334 were early flowering. All lines had very poor seed yield. Two T2 populations were also examined; T2-326 plants were early flowering and had rather upright leaves. T2-324 plants showed some size variation, but were otherwise wild type.

[1363] Lines 361-374: all T1 lines were tiny and dark in coloration at the seedling stages. Later these plants were small with pointed upright leaves. #362, 365, 368 were very small. #363, 366, 369, 371, 372 were early flowering. All lines showed poor fertility and yielded relatively few seeds.

[1364] Lines 381-384: all T1 lines were small, with spindly stems and showed slightly early flowering.

[1365] Physiology (Plate assays) Results. Three 35S::G3391 lines were more tolerant to sodium chloride in a germination assay. It is worth noting that five of the lines that were not tolerant to sodium chloride were small, vitrified, or chlorotic.

[1366] Discussion. 35S::G3391 lines exhibited a number of morphological changes similar to those seen in 35S::G867 lines including a reduction in overall size, alterations in leaf shape and orientation, and floral abnormalities. Additionally, a substantial number of the G3391 lines showed accelerated flowering, indicating that G3391 acts to promote the floral transition. Other lines showed small, vitrified, or chlorotic phenotypes and were not salt tolerant in the plate-based assays. No consistent alteration in tolerance was obtained in a soil drought experiment.

[1367] Potential application: This project indicates that G3391 could be applied to effect abiotic stress tolerance in commercial species. In addition, the accelerated flowering seen in 35S::G3391 plants indicate that the gene could be used to manipulate flowering time. In particular, shortening generation times would also help speed-up breeding programs, particularly in species such as trees, which typically grow for many years before flowering. Conversely, it may be possible to modify the activity of G3391 or its closely-related homologs to delay flowering in order to achieve an increase in biomass and yield. The possible deleterious effects associated with high overexpression levels, however, suggests that tissue specific or conditional promoters might be required to optimize the utility of this gene.

G3432 (SEQ ID NO: 101 and 102; Zea mays)—Constitutive 35S

[1368] Background. G3432 is a maize gene that is a closely-related homolog of G867. The aim of this project was to determine whether G3432 has an equivalent function to G867 via the analysis of 35S::G3432 Arabidopsis lines.

[1369] Morphological Observations. Overexpression of G3432 produced a variety of deleterious pleiotropic morphological effects in Arabidopsis. 35S::G3432 lines were extremely small and showed alterations in coloration, leaf shape, leaf orientation, and floral defects that resulted in poor fertility. Occasional lines also showed reductions in trichome density. Many lines were late flowering. It should be noted that only lines with a relatively weak phenotype yielded sufficient seed for physiology assays.

[1370] Physiology (Soil Drought—Clay Pot) Summary. Three independent 35S::G3432 lines were tested in a single run of a soil drought assay. One of these lines (#304) showed a significantly improved survival relative to wild type. However, another line (#312) showed a worse survival than wild type. The third line (#309) showed a comparable performance to controls.

[1371] It has not been determined whether there exists a molecular basis (such as differences in transgene expression level) for the opposing results obtained with the different lines. It should be noted, though, that plants from line 312 were extremely tiny and this likely influenced their performance.

TABLE 64
35S::G3432 drought assay results:

| | | Mean | Mean | p-value for | Mean | Mean | p-value for |
|---|---|---|---|---|---|---|---|
| | Project | drought | drought | drought score | survival for | survival for | difference in |
| Line | Type | score line | score control | difference | line | control | survival |
| 304 | DPF | 3.5 | 1.0 | 0.0056* | 0.57 | 0.16 | 0.0000000027* |

DPF = direct promoter fusion
Survival = proportion of plants in each pot that survived
Drought scale: 6 (highest score) = no stress symptoms, 0 (lowest score; most severe effect) = extreme stress symptoms
*line performed better than control (significant at P < 0.11)

[1372] Discussion. 35S::G3432 lines exhibited a number of morphological changes including a reduction in overall size, alterations in leaf shape and orientation, and floral abnormalities, and in some cases, reduced trichome density. These phenotypes were more severe than, but otherwise comparable to, those obtained from overexpression of G867. These lines have now been tested in drought related stress assays. One line, #304, performed significantly better than controls in the clay pot drought assay, while another line, with a more severe morphological phenotype, performed worse than controls in the same assay. In the plate-based assays, all of the 35S::G3432 showed severe morphological defects versus controls, which made the results difficult to interpret.

[1373] Potential application: We have obtained initial evidence from soil assays that G3432 can effect drought tolerance. Nevertheless, the undesirable effects associated with overexpression of this gene suggest that it would need to be optimized by using a different promoter or by engineering changes within the protein, before it could be applied to develop a product.

[1374] The morphological changes seen in 35S::G3432 lines indicate that the gene may be used to manipulate various aspects of plant development. In particular, G3432 may be used to modify trichome formation. Such structures have a variety of roles and in some species accumulate potentially valuable secondary metabolites. In other cases trichomes are thought to offer protection against water loss or insect attack.

G3451 (SEQ ID NO: 107 and 108; Glycine max)—Constitutive 35S

[1375] Background. G3451 is a soy gene that is a closely-related homolog of G867. The aim of this project was to determine whether G3451 has an equivalent function to G867 via the analysis of 35S::G3451 Arabidopsis lines.

[1376] Morphological Observations. Overexpression of G3451 produced a wide spectrum of effects on Arabidopsis growth and development, including alterations in plant size, coloration, growth rate, leaf shape and orientation, and flowering time.

[1377] Three batches of T1 lines were obtained (301-317, 321-335, 341-360). At the early seedling stage, some of these plants had cotyledon abnormalities. Later, many lines were slow growing, exhibited vertically oriented leaves and flowered later than wild-type. Such phenotypes were apparent in all the lines, to varying extents. It should be noted that the most severely affected lines died without yielding seed; only lines with a mild phenotype could therefore be taken forward for physiology assays.

[1378] Three T2 populations were morphologically examined; the plants were rather dwarfed, but the phenotypes were generally weaker than those seen among primary transformants. T2-303 plants were also slightly early flowering.

[1379] Physiology (Plate assays) Results. Six out of ten 35S::G3451 lines showed good performance when germinated on plates containing sucrose. In addition, seven out of ten lines were noted to have small pale seedlings with narrow leaves and had short thick roots with more root hairs.

[1380] Physiology (Soil Drought-Clay Pot) Summary. G3451 overexpression conferred enhanced drought tolerance in Arabidopsis. Three independent 35S::G3451 lines were tested; two of these lines (#302 and 314) showed significantly better survival than the wild type control. The third line (#303) was significantly less stressed than the control after 8 days of dry down, but did not show a significant difference in survival rate.

TABLE 65
35S::G3451 drought assay results:

| | | | Mean | | | | |
|---|---|---|---|---|---|---|---|
| | | Mean | drought | p-value for | Mean | Mean | |
| | Project | drought | score | drought score | survival | survival for | p-value for difference in |
| Line | Type | score line | control | difference | for line | control | survival |
| 302 | DPF | 3.2 | 0.67 | 0.0020* | 0.57 | 0.14 | 0.000000010* |
| 303 | DPF | 1.8 | 0.67 | 0.031* | 0.21 | 0.14 | 0.18 |
| 314 | DPF | 4.5 | 0.67 | 0.0013* | 0.75 | 0.14 | 0.0000000000000036* |

DPF = direct promoter fusion project
Survival = proportion of plants in each pot that survived
Drought scale: 6 (highest score) = no stress symptoms, 0 (lowest score; most severe effect) = extreme stress symptoms
*line performed better than control (significant at P < 0.11)

[1381] Discussion. A number of 35S::G3451 lines have been established, and show a number of morphological defects including a reduction in plant size, unusual coloration, slow growth rate, alterations in leaf shape and orientation, and slightly early flowering time. Many of these phenotypes are similar to what was observed in 35S::G867 lines, indicating that this soy homolog has some conserved function with the Arabidopsis gene. 35S::G3451 lines with mild morphological phenotypes were tested for abiotic stress tolerance. As with some of the other soy homologs of G867, a root hair phenotype is visible in these overexpression lines.

[1382] Potential application: Based on the results of our overexpression studies, G3451 is an excellent candidate gene for improvement of abiotic stress tolerance in commercial species. However, the morphological effects associated with its overexpression, suggests that tissue specific or conditional promoters might be required to optimize the utility of this gene.

G3452 (SEQ ID NO: 97 and 98; Glycine max)—Constitutive 35S

[1383] Background. G3452 is a soy gene that is a closely-related homolog of G867. The aim of this project was to determine whether G3452 has an equivalent function to G867 via the analysis of 35S::G3452 Arabidopsis lines.

[1384] Morphological Observations. Overexpression of G3452 produced a wide spectrum of effects on Arabidopsis growth and development, including alterations in plant size, coloration, growth rate, leaf shape and orientation, and flowering time.

[1385] Two batches of T1 lines were obtained (301-318 and 321-340). The majority of plants were small, dark, slow developing, had vertically oriented abnormally-shaped leaves and flowered later than wild type. However, a small number of lines were noted to be slightly early flowering. Some lines also exhibited floral defects and aberrant branching patterns. The above effects were also apparent in two (T2-305 and T2-310) of three T2 populations that were morphologically examined. Plants from T2-304 appeared wild type.

[1386] Physiology (Plate assays) Results. Five of six 35S::G3452 lines were more tolerant to sucrose in a germination assay. Four of these lines were more tolerant to sodium chloride in another germination assay, and two of the lines performed well in a cold germination assay. Several 35S::G3452 lines were noted to be small and chlorotic with little secondary root growth. However, two lines showed more root hair growth versus controls.

[1387] Discussion. 35S::G3452 lines displayed a number of morphological similarities to those seen in 35S::G867 lines, such as reduced plant size, leaf coloration, growth rate, leaf shape and orientation. A number of the 35S::G3452 lines also showed alterations in flowering time. 35S::G3452 lines were subjected to drought related assays, and were more tolerant to sucrose, sodium chloride, and cold during germination than control plants. As with other soy homologs of G867, a root hair phenotype is visible in these overexpression lines.

[1388] Potential application: This project indicates that G3452 could be applied to effect drought-related abiotic stress tolerance in commercial species. In addition, the accelerated flowering seen in 35S::G3452 plants indicate that the gene could be used to manipulate flowering time. In particular, shortening generation times would also help speed-up breeding programs, particularly in species such as trees, which typically grow for many years before flowering. Conversely, it may be possible to modify the activity of G3452 or its closely-related homologs to delay flowering in order to achieve an increase in biomass and yield. The gene might also be used to modify other aspects of development such as root morphology.

G3455 (SEQ ID NO: 95 and 96; Glycine max)—Constitutive 35S

[1389] Background. G3455 is a soy gene that is a closely-related homolog of G867. The aim of this project was to determine whether G3455 has an equivalent function to G867 via the analysis of 35S::G3455 Arabidopsis lines.

[1390] Morphological Observations. Overexpression of G3455 produced a complex spectrum of morphological effects including changes in plant size, flowering time, leaf shape and orientation, trichome density, and floral defects.

[1391] A total of twenty T1 lines (361-380) were examined; at early seedling stages, about 50% of the lines were small and dark in coloration. Later, the majority of plants were smaller then wild-type, to varying extents. 6/20 (#362, 364, 370, 371, 375, 377) lines were early flowering and 6/20 had upright leaves (#365, 367, 368, 369, 374, 376). Two of the T1 lines exhibited a partial glabrous phenotype and were noticeably slow developing.

[1392] Three 35S::G3455 T2 populations were later examined. Plants from each of these populations were small, slow developing and displayed vertically oriented leaves. At later stages, the plants formed rather bushy inflorescences and had poorly developed siliques Physiology (Plate assays) Results. Nine out of ten 35S::G3455 lines performed well in a germination assay (versus controls) in the presence of sucrose. Several lines were also noted to have poor germination rates, long narrow leaves, less root branching, and in a few lines, more root hairs.

[1393] Discussion. A number of 35S::G3455 lines have been established, and show a number of morphological defects including changes in plant size, flowering time, leaf shape and orientation, trichome density, dark leaf coloration and slightly early flowering time. Many of these phenotypes are similar to what was observed in 35S::G867 lines, indicating that this soy homolog has some conserved function with the Arabidopsis gene. Almost all lines tested are more tolerant to sucrose than controls in the plate-based assays. As with other soy homologs of G867, a root hair phenotype is visible in these overexpression lines.

[1394] Potential applications. Based on the results of our overexpression studies, G3455 is a good candidate gene for improvement of abiotic stress tolerance in commercial species. However, the morphological effects associated with its overexpression, suggests that tissue specific or conditional promoters might be required to optimize the utility of this gene.

### The G922 Clade

[1395] G922 (SEQ ID NO: 327 and 328; Arabidopsis thaliana)—Constitutive 35S

[1396] Published Information

[1397] G922 corresponds to Scarecrow-like 3 (SCL3) first described by Pysh et al. (GenBank accession number AF036301; (1999) Plant J. 18: 111-119). Northern blot analysis results show that G922 is expressed in siliques, roots, and to a lesser extent in shoot tissue from 14 day old seedlings. Pysh et al did not test any other tissues for G922 expression. In situ hybridization results showed that G922 was expressed predominantly in the endodermis in the root tissue. This pattern of expression was very similar to that of SCARECROW (SCR), G306. Experimental evidence indicated that the co-localization of the expression is not due to cross-hybridization of the G922 probe with G306. Pysh et al proposed that G922 may play a role in epidermal cell specification and that G922 may either regulate or be regulated by G306.

[1398] The sequence for G922 can also be found in the annotated BAC clone F11F12 from chromosome 1 (GenBank accession number AC012561). The sequence for F11F12 was submitted to GenBank by the DNA Sequencing and Technology Center at Stanford University.

[1399] Experimental Observations. The function of this gene was analyzed using transgenic plants in which G922 was expressed under the control of the 35S promoter. Transgenic plants overexpressing G922 were more salt tolerant than wild-type plants as determined by a root growth assay on MS media supplemented with 150 mM NaCl. Plant overexpressing G922 also were more tolerant to osmotic stress as determined by germination assays in salt-containing (150 mM NaCl) and sucrose-containing (9.4%) media. G922 overexpressors were also more tolerant to growth in cold conditions than wild-type plants, and were also less sensitive to ABA than wild type. Morphologically, plants overexpressing G922 had altered leaf morphology (including curling, upright-oriented leaves), dark coloration, and somewhat reduced overall plant size. In wild-type plants, expression of G922 was induced by auxin, ABA, heat, and drought treatments. In non-induced wild-type plants, G922 was expressed constitutively at low levels.

[1400] The high salt assays indicated that this gene might confer drought tolerance, which was confirmed in soil-based assays, in which G922-overexpressors were significantly healthier after water deprivation treatment than controls.

[1401] Potential Applications. Based upon results observed in plants overexpressing G922 or its equivalogs could be used to increase tolerance to salt, drought and other hyperosmotic stress, increase tolerance to cold, and alter leaf morphology in plants.

### The G1073 Clade

[1402] G1073 (SEQ ID NO: 113 and 114; Arabidopsis thaliana)—Constitutive 35S

[1403] Background. G11073 was included in the drought program based on the drought tolerance and enhanced yield shown by 35S::G1073 lines. We have now designated this locus as HERCULES I (HRC1).

[1404] The aim of this study was to re-assess 35S::G1073 lines and compare its overexpression effects to those of its homologs. We also sought to test whether use of a two-component overexpression system would produce any strengthening of the phenotype relative to the use of a 35S direct promoter-fusion.

[1405] Morphological Observations. We have now generated 35S::G1073 lines (301-320) using the 2-component system. These lines exhibited comparable morphological effects to the 35S direct promoter fusion lines.

[1406] Two-Component Lines:

[1407] 35S::G1073 two-component lines showed a mild to moderate delay in the onset of flowering and developed larger broader leaves than those of wild type. These effects were of intermediate penetrance, being observed to varying extents in eight of twenty T1 lines (#303, 304, 305, 308, 310, 314, 318, 319). It should be noted that considerable size variation was apparent among the remaining twelve lines in the set, and for unknown reasons, some of these plants (#307, 309, 312, 313, 315, 316, 317) died prior to reaching maturity.

[1408] The following lines were examined in subsequent generations, as detailed below:

[1409] T2-301: all showed a moderate phenotype.

[1410] T2-302: appeared wild type.

[1411] T2-304: all late flowering with broad curled leaves.

[1412] T3-304: all small at early stages with curled leaves. Plants were late flowering and leaves became enlarged at late stages.

[1413] T2-305: showed a mild phenotype.

[1414] T2-308: showed a mild phenotype.

[1415] T2-310: showed a moderate phenotype, all plants had distinctly broad leaves and flowered 3-4 days late. Inflorescence internodes were short and plants had a bushy appearance.

[1416] T2-311: occasional plants showed a very mild phenotype, most appeared wild type.

[1417] T2-314: all showed a moderately strong phenotype.

[1418] T2-319: showed a moderate phenotype, all plants had distinctly broad leaves and flowered about 1 week late.

[1419] Of the lines submitted for physiological assays, the following showed a segregation on selection plates in the T2 generation that was compatible with the transgene being present at a single locus: 305, 308, 310, 311, 314, 319. Lines 301, 304, 306, and 320 showed segregation that was compatible with insertions at multiple loci.

[1420] Direct Fusion Lines:

[1421] An additional set of direct fusion lines (1921-1940) harboring P448 have also been obtained: 6/20 of these lines (1923, 1927, 1929, 1933, 1935, 1937) showed large leaves and slightly delayed flowering. The remaining plants exhibited wild-type morphology.

[1422] A number of additional studies have been performed with the original 35S::G1073 lines obtained during the genomics program. We compared 35S::G1073 seedlings grown on plates with wild-type and noted that an increase in size is apparent from very early in the rosette stage. Additionally the 35S::G1073 seedlings have more extensive root development and develop longer root hairs than controls. Sections through the root tips of these lines, though, indicate that the root meristems have a comparable organization to those in the wild-type.

[1423] Results for a full-length G1073 clone. It should be noted that the initial G1073 constructs P448 (35S::G1073, Direct promoter-fusion) and P3369 (opLexA::G1073 for 2-components-supTfn) harbored an N-terminally truncated clone (see sequence details). We have now obtained a full-length G1073 clone (within P25703, a 35S::G1073 direct fusion construct). Two sets of lines for this fall-length clone have now been morphologically examined.

[1424] Lines 1961-1980 (for full-length clone P25703): 5/20 (#1968, 1969, 1972, 1975, 1978) showed a very marked phenotype (short petioles, large broad, round leaves, large flowers). 7/20 showed a moderate phenotype (1962, 1963, 1964, 1966, 1973, 1976, 1977), 4/20 showed a mild phenotype (1967, 1970, 1971, and 1974), and 4/20 (#1961, 1965, 1979, 1980) appeared wild type. The following lines were late flowering: #1963, 1966, 1968, 1969, 1972, 1975, 1977, 1978.

[1425] Lines 1981-2000 (for full-length clone P25703): 19/20 lines all showed evidence of an increased biomass phenotype (except for #1988 which was small with flat pale leaves). 4/20 (1982, 1987, 1990, 1992) lines displayed a mild phenotype, whereas the remaining lines showed a moderately strong phenotype. The following lines were late flowering: #1981, 1983, 1984, 1986, 1989, 1991, 1994, 1995, 1997, 1998, 2000.

[1426] Based on these two sets of lines, in comparison to the lines obtained for the N-terminally truncated form of G1073, it appears that the increased biomass phenotype is rather more marked and seen at higher penetrance when the full-length clone is overexpressed (during our earlier genomics program, 11/20 lines overexpressing the truncated form of G1073 showed an increased size phenotype).

[1427] Physiology (Plate assays) Results. 35S::G1073 lines behaved similarly to wild-type controls in all physiological assays performed. We have now re-examined a greater number of 35S::G1073 lines, this time via a 2-component overexpression approach. All ten of the new lines out-performed controls when germinated on plates containing sodium chloride. Five out of the ten lines also had better growth on plates containing sucrose.

[1428] A new set of 35S direct promoter fusion lines showed better tolerance to water stress in a severe dehydration stress assay, but did not exhibit better growth on plates containing sodium chloride or sucrose.

[1429] Physiology (Soil Drought-Clay Pot) Summary. 35S::G1073 two-component lines showed an enhanced performance, relative to controls, in soil drought assays. Five independent 35S::G1073 2-component lines have been tested. Two of these lines (#310 and 311) showed a significantly better survival than controls in each of two different repeats of a “whole pot” soil drought assay. Both of the lines, however, displayed a comparable performance to wild-type in a single run of the “split pot” assay (line and controls in same pot). A different, line (#314) was not tested in a “whole pot” assay, but survived better than controls in a “split pot” assay.

TABLE 66
35S::G1073 drought assay results:

| | | | | | p-value for | | | |
|---|---|---|---|---|---|---|---|---|
| | | | | Mean | drought | Mean | Mean | p-value for |
| | Project | Assay | Mean drought | drought | score | survival | survival | difference in |
| Line | Type | Type | score line | score control | difference | for line | for control | survival |
| 310 | TCST | Whole Pot | 3.0 | 1.4 | 0.0017* | 0.35 | 0.19 | 0.0019* |
| 310 | TCST | Whole Pot | 3.4 | 1.8 | 0.018* | 0.56 | 0.25 | 0.00000016* |
| 310 | TCST | Split Pot | 0.67 | 0.50 | 0.77 | 0.23 | 0.20 | 0.41 |
| 311 | TCST | Whole Pot | 1.1 | 0.70 | 0.26 | 0.18 | 0.11 | 0.091* |
| 311 | TCST | Whole Pot | 1.5 | 0.50 | 0.078* | 0.31 | 0.057 | 0.0000010* |
| 311 | TCST | Split Pot | 0.50 | 0.83 | 0.42 | 0.17 | 0.25 | 0.13 |
| 314 | TCST | Split Pot | 0.33 | 0.17 | 1.0 | 0.17 | 0.073 | 0.015* |

TCST = Two component super transformation project
Survival = proportion of plants in each pot that survived
Drought scale: 6 (highest score) = no stress symptoms, 0 (lowest score; most severe effect) = extreme stress symptoms
*line performed better than control (significant at P < 0.11)

[1430] Discussion. G1073 overexpression via the two-component system resulted in similar phenotypes to those previously observed by us. Namely, many lines exhibited an increase in biomass relative to wild type along with changes in leaf morphology and a slight to moderate delay in flowering time. We have also more extensively examined a number of our original 35S::G1073 direct fusion lines and found that the increased size phenotype is apparent from very early in the rosette stage in some of the lines. The 35S::G1073 seedlings also had more extensively developed roots and longer, denser, root hairs than wild type.

[1431] Importantly, the two-component 35S::G1073 lines displayed good tolerance to high salt and sucrose levels during germination compared to the wild type, and also compared to direct 35S::G1073 fusion lines. It is possible that this enhanced performance arose from the two-component approach producing a higher level of G1073 expression than the direct fusion construct. The two-component lines also showed very marked tolerance in soil drought assays. In particular, one line (#311) had very mild morphological changes while exhibiting effective resistance to high salt levels during germination and effective tolerance to drought in a soil assay. Thus, the stress resistance phenotypes obtained with this gene are separable from the developmental changes.

[1432] In single pot soil drought assays, three independent 35S::G1073 lines (two direct fusion lines and a two-component line) were examined at well-watered, mild drought, and moderate drought states for a variety of physiological parameters. Apart from an apparent reduction in chlorophyll content in the 35S::G1073 lines versus wild-type at each of the stages, no consistent differences were observed. The physiological basis of the drought tolerance in 35S::G1073 lines is not yet clear and might be related either to parameters that were not measured in the physiology experiments or to changes that were too subtle to detect.

[1433] Effects of a full-length G1073 clone versus a short variant. It should be noted that our initial G1073 constructs P448 (35S::G1073, Direct promoter-fusion) and P3369 (opLexA::G1073 for 2-components-supTfa) harbored an N-terminally truncated clone (see sequence details). We have now obtained a full-length G1073 clone (construct P25703) and morphologically examined overexpression lines. 35S::G1073 lines for this full-length cDNA clone showed markedly enhanced biomass in the majority of lines, and no evidence of dwarfing off-types were apparent. In particular, it appears that the increased biomass phenotype is rather more marked and seen at higher penetrance when the full-length clone is overexpressed versus our original truncated clone.

[1434] It should be noted that we have obtained similar morphological and physiological phenotypes from overexpression of the related Arabidopsis genes (G2153 and G2156) indicating that these genes are likely to be functionally related.

[1435] Potential applications. The results of this study show that G1073 can be used to improve drought related stress tolerance. In light of the different range of effects exhibited by two-component and direct fusion constructs, it may be possible to identify lines with optimal expression patterns for minimized morphological changes with effective stress tolerance. The data also confirm our earlier conclusions that G1073 could be applied to increase biomass and modify flowering time.

G1073 (SEQ ID NO: 113 and 114; Arabidopsis thaliana)—Root ARSK1

[1436] Background. The aim of this project was to determine whether expression of G1073 from an ARSK1 promoter, which predominantly drives expression in root tissue, is sufficient to confer stress tolerance that is similar to, or better than, that seen in 35S::G1073 lines. We also wished to test whether the increased biomass seen in 35S::G1073 lines would arise from a root specific expression pattern.

[1437] Morphological Observations. Arabidopsis lines in which G1073 was expressed from the ARSK1 promoter (via the two component system) displayed no consistent difference in morphology compared to controls.

[1438] Twenty T1 lines were examined (341-360); three lines (#342, 346, 357) were noted to be slightly small and slow developing. However the remainder of the lines exhibited wild-type morphology at all stages. No consistent effects on morphology were noted in the T2 populations that were examined.

[1439] Of the lines submitted for physiological assays, all except line 556 showed segregation on selection plates in the T2 generation that was compatible with the transgene being present at a single locus. Lines 556, showed segregation that was compatible with insertions at multiple loci.

[1440] Physiology (Plate assays) Results. Seedlings from five ARSK1::G1073 lines had more seedling vigor compared to wild type when germinated on plates containing sodium chloride. Seedlings from two other lines performed better than wild-type in a cold germination assay.

[1441] Discussion. We have obtained ARSK1::G1073 lines using a two component approach; no consistent effects on morphology were apparent among these transformants and alterations in leaf size were not observed. Thus, either expression from the ARSK1 promoter was too weak or root expression was not sufficient to trigger the alterations in leaf size that are apparent in 35S::G1073 lines.

[1442] Interestingly, although ARSK1::G1073 lines showed no clear morphological changes, five out of ten of these lines did exhibit enhanced tolerance to sodium chloride in a plate based germination assay. Two other lines outperformed wild type in a cold germination assay. These phenotypes are of particular interest, since they show that G1073 can provide stress tolerance independently of changes in organ size. Additionally, since ARSK1 is not significantly expressed in shoot tissue, the results suggest that G1073 expression is not required in the shoot in order to achieve stress tolerance. However, it should be noted that the enhancement of tolerance to salt in plate assays was weaker using the ARSK1 promoter in comparison with the 35S promoter. ARSK1::G1073 lines showed rather inconsistent results in soil drought assays; a single line showed improved tolerance on one plant date, but this was not seen on a second date.

[1443] Potential applications. Based on overexpression studies (see 35S::G1073 report), G1073 is a good candidate gene for improvement of abiotic stress tolerance. However, an ARSK1::G1073 combination does not offer significant tolerance in a soil drought assay, in contrast to results with the 35S::G1073 combination under soil drought conditions.

G1073 (SEQ ID NO: 113 and 114; Arabidopsis thaliana)—Epidermal CUT1

[1444] Background. The aim of this project was to determine whether expression of G1073 from a CUT1 promoter (which predominantly drives expression in shoot epidermal tissue, with highest levels of expression in guard cells), is sufficient to confer stress tolerance that is similar to, or better than, that seen in 35S::G1073 lines. We also wished to test whether the increased biomass seen in 35S::G1073 lines would arise from an epidermis-specific expression pattern.

[1445] Morphological Observations. In Arabidopsis lines that express G1073 from the CUT1 promoter using the two component system, CUT1::LexA; opLexA::G1073, have now been generated. some size variation was apparent at early stages of growth, but overall, the plants showed no consistent differences in morphology to controls.

[1446] Plants from each of three CUT1::G1073 T2 populations all showed wild-type morphology.

[1447] Physiology (Plate assays) Results. Three CUT1::G1073 lines showed increased seedling vigor when germinated on plates containing sodium chloride. Of these three lines, seedlings of two lines also performed better than wild-type when germinated on sucrose whereas seedlings of the third line had better vigor when germinated on mannitol containing plates. A fourth line showed a better performance only in a sucrose germination assay.

[1448] Discussion. We have obtained CUT1::G1073 lines using a two component approach; no consistent effects on morphology were apparent among these transformants and alterations in leaf size were not observed. Thus, either expression from the CUT1 promoter was too weak or epidermal expression was not sufficient to trigger the alterations in leaf size that are apparent in 35S::G1073 lines.

[1449] Interestingly, although CUT1::G1073 lines showed no clear morphological changes, three out of ten of these lines did exhibit enhanced tolerance to sodium chloride in a plate based germination assay. Two of these lines also outperformed wild type in a sucrose germination assay, whereas the third line germinated better than wild type on mannitol media. A fourth CUT1::G1073 line gave a positive result in the sucrose assay alone. Although these osmotic stress tolerance phenotypes were seen in a relatively small number of lines, they are of particular interest, since they indicate that G1073 can provide stress tolerance independently of changes in organ size. Additionally, the CUT1 driver line does not give significant expression in the root, suggesting that G1073 expression is not required in the root in order to achieve such tolerance. However, CUT1::G1073 lines did not provide any consistently enhanced tolerance to drought in a soil assay. For example, line 394, which had enhanced tolerance to both salt and sucrose in germination assays, did not confer consistent improvement in a drought assay. Whether this is a function of expression pattern or expression level remains unclear at this time.

[1450] Potential applications. Based on overexpression studies (see 35S::G1073 report), G1073 is a good candidate gene for improvement of abiotic stress tolerance. Expression of G1073 using the CUT1 promoter may be inadequate to provide improved performance in a soil drought assay.

G1073 (SEQ ID NO: 113 and 114; Arabidopsis thaliana)—Vascular SUC2

[1451] Background. G1073 was included in drought program based on the drought tolerance and enhanced yield shown by 35S::G1073 lines. We have now designated this locus as HERCULES 1 (HRC1).

[1452] The aim of this project was to determine whether expression of G1073 from a SUC2 promoter, which predominantly drives expression in a vascular pattern, is sufficient to confer stress tolerance that is similar to, or better than, that seen in 35S::G1073 lines. We also wished to test whether the increased biomass seen in 35S::G1073 lines would arise from a vascular expression pattern.

[1453] Morphological Observations. SUC2::G1073 lines exhibited delayed flowering, changes in leaf shape, and increased rosette biomass at late stages of development.

[1454] Two component lines. Three sets of 2-component lines have been obtained.

[1455] Two sets (#1081-1088, 1101-1105) comprised an opLexA::G1073 construct supertransformed into a SUC2::LexA-GAL4TA promoter driver line (#6). In each of these sets, a number of lines exhibited enlarged leaves and a slight delay in the onset of flowering, as detailed below:

[1456] Lines 1081-1088: all appeared wild type at early stages. #1085 and #1088 were slightly late flowering and developed enlarged leaves at later stages. #1082 was also slightly late flowering. The remaining lines showed wild-type morphology at all stages. Lines 1081, 1085 and 1087 were examined in the T2 generation and all showed a wild-type morphology.

[1457] Lines 1101-1105: all were slightly small at early stages. #1102 and #1105 were slightly later flowering and #1102 developed enlarged rosette leaves at late stages. The remaining lines all appeared wild type later in development.

[1458] The third set of two component lines (#1941-1949) comprised an opLexA::G1073 construct supertransformed into a stronger SUC2::LexA-GAL4TA promoter driver line (#12). These plants showed a markedly stronger phenotype than that seen in the first two sets of lines. At early stages, these plants were small and had narrow leaves with rather long petioles. All the lines showed a marked delay in the onset of flowering and developed much longer curled leaves compared to wild type. It is perhaps worth noting that the morphology of these leaves was somewhat different than in 35S::G1073 lines, where the leaves had a broad round appearance.

[1459] Direct promoter-fusion lines. Comparable effects to those seen in the (#1941-1949) 2-component lines were obtained in SUC2::G1073 direct fusion lines. Delayed flowering and enlarged leaves were observed in plants from each of two different sets of lines.

[1460] Physiology (Plate assays) Results. Two versions of G1073 under the control of the SUC2 promoter have been used. Both the direct fusion and two-component versions show good tolerance to cold during germination (3/10 two-component lines and 4/10 direct-promoter fusion lines).

[1461] Discussion. We have obtained SUC2::G1073 lines using both a two component and direct fusion approach. In each case, a significant number of lines exhibited a delay in the onset of flowering and enlarged leaves relative to controls. This effect became particularly apparent at later developmental stages. Similar phenotypes were obtained at a comparable frequency in 35S::G1073 lines; thus the SUC2 and 35S promoters produced comparable morphological effects when used in combination with G1073. Interestingly, though, the shape of the leaves in SUC2::G1073 and 35S::G1073 plants was subtly different; leaves of the 35S lines were somewhat rounder than in the SUC2 lines. It is not yet clear whether the increase in organ size in the SUC2::G1073 lines arose from G1073 activity within the developing organ primordia themselves or from G1073 protein (or associated signals) moving into shoot meristems or newly incipient primordia from nearby vasculature.

[1462] SUC2::G1073 lines have showed improved stress tolerance on plates, particularly to cold treatment. However, results with the soil drought assay have varied, and there is no clear improvement in drought tolerance using the SUC2-promoter.

[1463] Potential applications. Based on the effects of overexpression studies (see 35S::G1073 report), G1073 is a good candidate gene for improvement of abiotic stress tolerance. However, the SUC2 promoter does not provide a good option for elimination of morphological effects with retention of drought tolerance. Nevertheless, given the increased biomass seen in these experiments, the SUC::G1073 combination may be used to manipulate traits related to plant organ size.

G1073 (SEQ ID NO: 113 and 114; Arabidopsis thaliana)—Shoot Apical Meristem STM

[1464] Background. The aim of this project was to determine whether the efficacy of the G1073 protein in conferring improved abiotic stress tolerance could be maintained by overexpressing the G1073 DNA sequence under the control of a shoot apical meristem-specific promoter.

[1465] Morphological Observations. While some lines, similar to 35S::G1073 plants, were late developing, and had broad, serrated leaves, the majority of STM::G1073 lines were similar to wild-type in their development and morphology.

[1466] Physiology (Plate assays) Results. Three out of ten STM::G1073 lines were more tolerant to plate-based severe desiccation than controls.

[1467] Physiology (Soil Drought-Clay Pot) Summary. One of three lines of STM::G1073 overexpressing plants was more tolerant to drought conditions in a soil-based assay.

G1073 (SEQ ID NO: 113 and 114; Arabidopsis thaliana)—Floral Meristem AP1

[1468] Background. The aim of this project was to determine whether the efficacy of the G1073 protein in conferring improved abiotic stress tolerance could be maintained by overexpressing the G1073 DNA sequence under the control of a floral meristem-specific promoter.

[1469] Morphological Observations. One line was late developing, but the majority of AP1::G1073 lines examined were similar to wild-type in their development and morphology.

[1470] Physiology (Plate assays) Results. Four out of ten AP1::G1073 lines were more tolerant to cold during germination than controls.

G1073 (SEQ ID NO: 113 and 114; Arabidopsis thaliana)—Super Activation (C-GAL4-TA)

[1471] Background. The aim of this project was to determine whether the efficacy of the G1073 protein could be improved by addition of a non-native GAL4 activation domain.

[1472] Morphological Observations. A total of twelve 35S::G1073-GAL4 T1 lines were isolated. Considerable morphological variation was apparent among the T1 lines. Four of the lines died at early stages. 3/8 (#1550, 1543, 1544) of the surviving plants were small, bushy and showed floral abnormalities. The remaining lines appeared wild type.

[1473] Three T2 populations were later examined. Plants from each of these populations appeared wild type.

[1474] Physiology (Plate assays) Results. Five out of eight lines containing a GAL4 carboxyl terminal activation domain fusion construct of G1073 were mildly more tolerant to water deficit in a severe plate-based dehydration assay.

[1475] Physiology (Soil Drought-Clay Pot) Summary. Two of three 35S::G1073-GAL4 lines tested were significantly more tolerant than controls a soil drought assay, as shown in the table below. A third line had significantly worse survival compared to controls (not shown).

TABLE 67
35S::G1073-GAL4 drought assay results:

| | | | Mean | | | | |
|---|---|---|---|---|---|---|---|
| | | Mean | drought | p-value for | Mean | Mean | |
| | Project | drought | score | drought score | survival for | survival for | p-value for difference |
| Line | Type | score line | control | difference | line | control | in survival |
| 1542 | GAL4 | 3.5 | 0.74 | 0.00036* | 0.56 | 0.19 | 0.000000000065* |
| | C-term | | | | | | |
| 1552 | GAL4 | 1.7 | 0.74 | 0.072* | 0.26 | 0.19 | 0.16 |
| | C-term | | | | | | |

GAL4 C-term = C-terminal translational fusion of transcription factor to a GAL4 acidic activation domain
Survival = proportion of plants in each pot that survived
Drought scale: 6 (highest score) = no stress symptoms, 0 (lowest score; most severe effect) = extreme stress symptoms
*line performed better than control (significant at P < 0.11)

[1476] Discussion. We have now isolated lines that overexpress a version of the G1073 protein that has a GAL4 activation domain fused to the C terminus. For the most part, lines were indistinguishable from wild type, but some morphological variation was noted in the T1 generation. A few lines with essentially wild-type morphology were tested for enhanced abiotic stress tolerance in plate assays and in soil drought assays. A significant number of the lines showed dehydration tolerance in the plate assays. Two lines (1542 and 1552) exhibited enhanced drought tolerance in soil assays (one of these, line 1552, also exhibiting enhanced growth on germination in mannitol and tolerance to severe dehydration stress in plates).

[1477] Potential applications. Based on the data from overexpression studies, G1073 is a good candidate gene for improving stress tolerance in commercial species. Lines with essentially wild-type morphology have showed enhanced drought tolerance, indicating that the C-terminal fusion of the GAL4-TA domain may be used in plants to overcome adverse morphological effects while retaining drought tolerance.

G1073 (SEQ ID NO: 113 and 114; Arabidopsis thaliana)—RNAi (GS)

[1478] Background. The aim of this project is to determine whether G1073 is necessary as part of the endogenous protection against drought related stress, by obtaining and testing a knock-down mutant under such conditions. A knock-down mutant for G1073 would assist with genetic analysis to allow a more encompassing understanding of where the gene is positioned in stress tolerance pathways and its mode of action.

[1479] Morphological Observations. A number of sets of G1073-RNAi (GS) lines have now been obtained. Overall, these plants showed no consistent differences in morphology to controls. It should be noted, though, that considerable size variation was noted among plants from the first two sets of T1 lines (561-580 and 581-600). However, a final set of lines (1001-1020) showed more uniform growth. Three T2 populations were morphologically examined. Plants from one population (573) were pale and early flowering. This phenotype may have reflected a transgene position effect, and was not observed in the other two lines, which appeared wild type (N.B. P21295 and P21117 are equivalent constructs).

[1480] Physiology (Plate assays) Results. Five of ten G1073-RNAi (GS) lines showed a better performance than controls in a severe dehydration assay. Three of these lines also showed a mild tolerance to NaCl in a germination assay. One of the five lines (#573) and another line (which did not show NaCl or dehydration tolerance) also showed tolerance in a heat germination assay. The heat tolerance phenotype was sporadic and was seen in 2/10 lines.

[1481] Discussion. We have obtained lines harboring an RNAi construct designed to target only G1073 and not other, related AT-Hook genes. Overall, these lines showed no consistent morphological differences from wild-type.

[1482] Seemingly conflicting results were obtained from abiotic stress assays, with lines that had increased salt and severe dehydration tolerance performing more poorly in the soil drought assay. Overexpression of G1073 leads to both increased salt tolerance and drought tolerance, suggesting, perhaps, a more complex relationship than anticipated between salt tolerance and drought tolerance control by G1073-regulated pathways. Focusing on drought tolerance itself, the data are consistent with a normal role for G1073 in drought tolerance. The data also suggest a difference in threshold for morphological and stress tolerance effects.

[1483] Potential applications. Based on our previous data, G1073 is a good candidate gene for improvement of stress tolerance and yield. The data from this project suggest that G1073 might play a role in the native pathways that confer tolerance to drought stress.

G1073 (SEQ ID NO: 113 and 114; Arabidopsis thaliana)—RNAi (Clade)

[1484] Background. The aim of this project was to further refine our understanding of G1073-regulated pathways by use of an RNAi approach; a construct (see sequence section) was generated that was targeted towards reducing activity of all members of the G1073 clade. Given that the different members of the G1073 clade are potentially functionally redundant, it was thought that this method could reveal phenotypes that might not be visible in single KO lines for the individual clade members.

[1485] Morphological Observations. Two sets of G1073-RNAi (clade) lines have been obtained. Overall, no consistent effects on morphology were observed in these plants.

[1486] Line Details:

[1487] T1 1021-1040: no clear difference to wild type, but 2/20 lines (1023, 1025) showed a slight delay in flowering and developed rather large rosettes compared to controls, at late stages.

[1488] T2-1024: all appeared wild type.

[1489] T2-1031: 3/6 were small with narrow curled leaves, 3/6 appeared wild type.

[1490] T2-1033: all appeared wild type.

[1491] T2-1038: all appeared wild type.

[1492] T1 1281-1300: no clear differences to controls but 3/20 lines (1283, 1294, 1297 were slightly pale and early flowering).

[1493] T2-1284: all appeared wild type.

[1494] T2-1296: all appeared wild type.

[1495] (N.B. the constructs P21160 and P21301 are identical.)

[1496] Physiology (Plate assays) Results. Three out of ten G1073-RNAi (clade) lines showed enhanced tolerance relative to controls in a plate based dehydration assay. One of these lines (#1033) and another line (#1295, which showed a wild-type performance in the dehydration assay) exhibited enhanced NaCl tolerance in a germination assay relative to control plants. In all other respects, G1073-RNAi (clade) lines behaved similarly to wild type in plate assays.

[1497] Discussion. We have obtained lines harboring an RNAi clade construct, which is expected to target G2156 and G1073 most effectively, and possibly G1067, G2153 and G1076. These plants appeared morphologically wild type.

[1498] Potential applications. A G1073-RNAi (clade) approach may be used to improve stress tolerance and yield.

G1073 (SEQ ID NO: 113 and 114; Arabidopsis thaliana)—Deletion Variant

[1499] Background. The aim of this project was to further refine our understanding of G1073 function by use of a “dominant negative” approach in which truncated versions of the protein were overexpressed. Two alternative constructs were built; one of these (P21271) overexpressed a short fragment of the G1073 protein spanning from 8 amino acids before the highly conserved AT-Hook motif to 22 amino acids after that motif. The second construct (P21272) overexpressed a longer G1073 fragment starting at the same position as the short fragment but containing an additional 108 amino acids (for a total of 130 amino acids past the AT-Hook motif), which includes most of the structural domain that is well conserved in G1073-related AT-Hook proteins.

[1500] Morphological Observations. Lines have been obtained for each of two different G1073 dominant negative constructs: P21271 and P21272. These constructs were each designed to overexpress a highly conserved central portion of the G1073 protein. P21271 contained a shorter fragment of G1073 than P21272 (see sequence notes).

[1501] Lines 861-880 were transformed with P21271. The majority of these lines displayed a wild-type phenotype and appeared wild type at all developmental stages. However, 4/20 lines (872, 879, 880, 870) were noted to have marginally larger leaves than wild type at the end of the rosette stage. This phenotype was subtle and was not observed at other developmental stages.

[1502] Line sets 881-889 and 1261-1280 each contained the construct P21272. Eight out of these twenty-nine plants (883, 886, 888, 889, 1264, 1265, 1270, and 1278) showed a variety of severe developmental defects and were extremely dwarfed, poorly fertile and often had contorted leaves. A number of the dwarf plants were also early flowering compared to controls. The remaining lines in the P21272 sets exhibited wild-type morphology.

[1503] Three T2 lines for P21272 were examined (see table below); plants from these populations showed wild-type morphology.

[1504] Discussion. We have now isolated lines overexpressing each of the G1073 deletion variant constructs. In contrast to overexpression lines for the full-length version of the gene, these truncated versions did not produce any improved tolerance to abiotic stress in plate assays or the soil drought assay. The majority of lines for each of the constructs exhibited wild-type morphology; however, in each case, a significant number of plants displayed developmental alterations.

[1505] Approximately 25% of the overexpression lines containing the longer peptide (P21272) exhibited deleterious morphological effects (dwarfing and contorted leaves). Such effects are not readily apparent among regular 35S::G1073 lines. However, it should be noted that such effects were frequently seen among overexpression lines for the related genes G2153 and G2156. Thus, it seems that sequences outside of the conserved domain (which was present in the longer deletion variant) are the responsible for the differences in dwarfing phenotypes seen with the paralogs versus G1073 itself.

[1506] Potential applications: Based on the data from overexpression studies, G1073 and the related proteins are good candidates for improving stress tolerance in commercial plant species. The results from these deletion variants demonstrate that the conserved AT-hook region of G1073 is not by itself sufficient to produce increased size and stress tolerance.

G1073 (SEQ ID NO: 113 and 114; Arabidopsis thaliana)—Double Overexpression

[1507] Background. The aim of this double overexpression approach is to determine whether different transcription factors will give an additive effect on drought tolerance when “stacked” together in the same line. The combinations (3)-(6) below are being made to test whether the delayed flowering produced by overexpression of G1073 can be overcome by a transgene that accelerates flowering.

[1508] Morphological Observations. Crosses have been set up between 35S::G1073 and the other overexpressing lines as follows:

[1509] (1) 35S::G1073 Line 4×35S::G481 (SEQ ID NO: 1) Line 3

[1510] A double homozygous line for this combination has been constructed and showed an additive morphological phenotype between G1073 and G481 overexpression (see “G481 (SEQ ID NO: 1 and 2; Arabidopsis thialiana)—Double Overexpression”, results for (1) 35S::G481×35S::G1073 (SEQ ID NO: 113)”, presented above.

[1511] (2) 35S::G1073 Line 3×35S::G682 (SEQ ID NO: 59) Line 16

[1512] This cross has been set-up and seed from an F2 population is in hand. We are currently in the process of screening for a double homozygous line. The double overexpressing individuals in the F1 and F2 populations showed an additive phenotype between G1073 and G682 overexpression; these plants were small at early stages, showed a glabrous phenotype, were late flowering, and developed broad, slightly serrated leaves. Overall, the size-related aspect of the phenotype was comparable to that seen in 35S::G1073 lines; overexpression of G1073 effectively overcame the dwarfing that is associated with G682 overexpression.

[1513] (3) 35S::G1073 Line 4 (Male)×35S::G3086 (SEQ ID NO: 291) Line 8 (Female)

[1514] Eleven F1 plants were obtained. All F1 plants showed an intermediate leaf phenotype, but were earlier flowering than wild-type. Thus, the accelerated flowering produced by G3086 overexpression appears epistatic to the delayed flowering associated with G1073 overexpression. The double overexpressing plants had broader leaves than the 35S::G3086 parental line, but the leaves were smaller than in wild-type and the 35S::G1073 parental line.

[1515] (4) 35S::G1073 Line 4×35S::G867 (SEQ ID NO: 87) Line 8

[1516] Seeds from an F1 population are currently in hand, but a double homozygote has not yet been identified. The F1 lines showed no consistent differences to wild-type and exhibited neither the large leaves characteristic of G1073 overexpression nor the dwarfing that is characteristic of G867 overexpression lines.

[1517] (5) 35S::G1073 Line 4×35S::G1274 (SEQ ID NO: 185) Line 16

[1518] Twelve F1 plants were obtained and these showed a strikingly additive morphological phenotype. The leaves of these plants were even larger than in either the 35S::G1073 or the 35S::G1274 parental line. The double overexpression line, however, still showed the loss of apical dominance that is characteristic of G1274 overexpression.

[1519] Physiology (Soil Drought-Clay Pot) Summary. One independent 35S::G1073 line 4×35S::G481 line 3 line was tested, and this line exhibited significantly better survival relative to controls.

TABLE 68
35S::G1073 line X 35S::G481 drought assay results:

| | | Mean | Mean | p-value for | Mean | Mean | p-value for |
|---|---|---|---|---|---|---|---|
| | | drought | drought | drought score | survival for | survival | difference in |
| Line | Project Type | score line | score control | difference | line | for control | survival |
| F1-1- | Double OEX | 3.4 | 2.3 | 0.021* | 0.57 | 0.36 | 0.00070* |
| F1-1- | Double OEX | 2.4 | 1.8 | 0.10* | 0.57 | 0.31 | 0.000011* |

OEX = Double overexpression
Survival = proportion of plants in each pot that survived
Drought scale: 6 (highest score) = no stress symptoms, 0 (lowest score; most severe effect) = extreme stress symptoms
*line performed better than control (significant at P < 0.11)

[1520] Discussion A crossing strategy was initiated to construct the above lines; details of progress are shown in the above “Morphological Observations”. Double overexpressors have been obtained for the 35S::G1073;35S::G682 combination, but we are still in the process of obtaining a double homozygote. However, these lines showed an intermediate morphology between those of the parental lines, having broad glabrous leaves. Overall, the size-related aspect of the phenotype was comparable to that seen in 35S::G1073 lines; overexpression of G1073 effectively overcame the dwarfing that is associated with G682 overexpression. One line, # F1-1-46, a 35S::G1073 line×35S::G481 double overexpressor line, showed greater drought tolerance than controls in repeat assays.

[1521] We have also obtained F1 plants from cross (3); these flowered earlier than wild-type, demonstrating that overexpression of G3086 can overcome the delay in flowering that results from G1073 overexpression. The leaves of the double overexpression line were broader and rounder than those of the 35S::G3086 parental line, but were smaller than those of wild-type and the 35S::G1073 parental line.

[1522] F1 plants were obtained from cross (9) and these showed a strikingly additive morphological phenotype. The leaves of these plants were even larger than in either the 35S::G1073 or the 35S::G1274 parental line. The double overexpression line, however, still showed the loss of apical dominance that is characteristic of G1274 overexpression.

[1523] Potential applications. Both the 35S::G3086;35S::G1073 and the 35S::G1073;35S::G1274 combinations indicate that a stacking approach might offer advantages over either of the 35S::G1073 transgene alone.

[1524] For example, 35S::G1073 in soybean produces a delayed flowering off-type which is associated with a yield penalty (field trial data). Combining G1073 and G3086 overexpression in the same line may afford drought tolerance without the delayed flowering caused by G1073.

[1525] A combination of 35S::G1274 and 35S::G1073 can be of particular value for applications where an increase in vegetative biomass is desired, such as in green leafy vegetables or in forestry crops. Additionally, since both G1073 and G1274 give very good drought tolerance when used singly, it is expected combining the two transgenes might give an exceptional tolerance to drought. It should also be noted that 35S::G1073 soybean lines show a strongly increased apical dominance off-type which leads to a yield reduction (field trial data). We have shown that the 35S::G1274;35S::G1073 double exhibits a reduced apical dominance phenotype in Arabidopsis, indicating that combining 35S::G1274 with 35S::G1073 in soybean will eliminate the off-type which is associated with the latter.

G1067 (SEQ ID NO: 119 and 120; Arabidopsis thaliana)—Constitutive 35S

[1526] Background. G1067 is a paralog of G1073. This gene and G2156 are the most related Arabidopsis paralogs of G1073, according to phylogenetic analysis.

[1527] G1067 corresponds to ESCAROLA (ESC) and the morphological effects of its overexpression have been documented by Weigel et al. (2000); these included slow growth, delayed flowering and leaf curling. Such observations were confirmed during our earlier genomics program.

[1528] The aim of the current study was to re-evaluate the effects of G1067 overexpression using a two-component approach.

[1529] Morphological Observations. We have so far been able to recover a total of only five 35S::G1067 (2-component) lines despite making selection attempts on six aliquots of T0 seed that were derived from three independent transformations.

[1530] The paucity of transformants recovered suggests that G1067 might have lethal effects when overexpressed via the two component system. Previously, 35S::G1067 direct promoter fusion lines were found to exhibit a variety of deleterious phenotypes. It is possible that a higher level of G1067 activity was attained with a two component approach and that this impeded the isolation of transformants.

[1531] Of the two-component lines that were obtained, four (#301, 302, 441, 442) of the five T1 lines were smaller and slow developing compared to controls. The final line #303 was tiny and arrested growth early in development.

[1532] Three lines (#301, 302, 442) examined in the T2 generation showed no consistent differences in morphology compared to controls, suggesting that the transgenes might have been less active than in the T1 generation.

[1533] An attempt was made to isolate additional 35S::G1067 direct fusion lines (these were shown to be dwarfed and have curled leaves), but no transformants were recovered.

[1534] Physiology (Plate assays) Results. Due to the deleterious effects of G1067 overexpression, only four 35S::G1067 lines were available for plate assays. Two (#441 and #442) of these four lines showed a better performance than controls on ABA germination plates. Line 441 also performed better than wild type in a cold growth assay.

[1535] Physiology (Soil Drought-Clay Pot) Summary. One of three independent 35S::G1067 (2-component) lines tested (#442) exhibited significantly better survival relative to controls.

TABLE 69
35S::G1067 (drought assay results:

| | | Mean | Mean | p-value for | Mean | Mean | p-value for |
|---|---|---|---|---|---|---|---|
| | Project | drought | drought score | drought score | survival for | survival for | difference in |
| Line | Type | score line | control | difference | line | control | survival |
| 442 | TCST | 3.0 | 0.89 | 0.024* | 0.31 | 0.19 | 0.049* |

TCST = Two component super transformation project
Survival = proportion of plants in each pot that survived
Drought scale: 6 (highest score) = no stress symptoms, 0 (lowest score; most severe effect) = extreme stress symptoms
*line performed better than control (significant at P < 0.11)

[1536] Discussion. Overexpression lines have been obtained using the two-component expression system. Lines generally exhibited an exacerbated phenotype compared to the phenotype observed in our earlier genomics program, and were very small and slow growing. No obvious increases in leaf size were noted, as were seen with G1073 overexpression. It should also be noted that two-component lines were obtained at very low frequency, possibly indicating that high level overexpression produced lethality. Four of the five lines produced T2 progeny with relatively wild-type morphology. The T2 progeny of one of these lines, #442, was more tolerant to drought treatment than the wild type in a clay pot assay, and was also more tolerant to ABA than wild type in a germination assay. A second line was both more tolerant to ABA in a germination assay and more tolerant to cold in a growth assay.

[1537] Potential applications. G1067 has been shown to confer improved tolerance to drought-related stress, although G1067 was fairly toxic to most transformants. It is possible that specific expression patterns or levels are necessary to enable recovery of wild type plants with enhanced drought tolerance. Interestingly, one of the 35S::G1067 lines (#442) from our studies could be an example of such an instance, since we obtained stress tolerance without any obvious morphological changes.

G1067 (SEQ ID NO: 119 and 120; Arabidopsis thaliana)—Stress Inducible RD29A—Line 5

[1538] Background. The aim of this project was to determine whether expression of G1067 from a stress inducible promoter (RD29A) would confer enhanced tolerance to drought related stress.

[1539] A two component approach was used for these studies and two different RD29A::LexA promoter driver lines were established: line 2 and line 5. Line 2 had a higher level of background expression than line 5, and thereby is expected to provide somewhat different regulation. Line 2 was observed to have constitutive basal expression of GFP, and to have a marked increase in GFP expression following the onset of stress. In contrast, line 5 exhibited very low background expression, although it still exhibited an up-regulation of expression following the onset of stress. However, the stress-induced levels of GFP expression observed in line 5 were lower than those observed for line 2.

[1540] Morphological Observations. Supertransformants for opLexA::G1067 into the RD29A_line5::LexA promoter background were obtained. Two sets of lines were isolated (661-670; 701-720). Approximately 50% of the lines showed changes in leaf size and shape and 50% of the lines appeared wild type.

[1541] Line Details:

[1542] T1 Lines 661-670: 7/10 lines (#661, 662, 664, 667, 668, 669, 770) were slightly small, with rather rounded leaves, at the rosette stage, but later appeared wild type. The remaining plants appeared wild type throughout development.

[1543] T1 Lines 701-720: #714, 716, 718 were small with rounded leaves at early stages. The remaining lines appeared wild type, early on. At later stages 8/20 lines, (#702, 703, 705, 709, 710, 711, 715, 720) displayed short, wide rosette leaves that curled downwards at the margins. Other lines from this set appeared wild type.

[1544] T2-664: 4/6 showed broad curled leaves and enlarged rosettes at later stages.

[1545] T2-710: 2/6 showed slightly broad leaves.

[1546] Physiology (Plate assays) Results. Six out of the ten lines showed good tolerance to dehydration stress in a severe dehydration assay. In addition, some lines also performed well in germination assays on mannitol, sucrose, ABA, cold, and sodium chloride (lines 711, 717, 708, and 710). Lines 707 and 708 had an increased root hair phenotype.

[1547] Physiology (Soil Drought-Clay Pot) Summary. Drought experiments on supertransformants for opLexA::G1067 into the RD29A_line5::LexA promoter background indicate that this gene/promoter combination might offer an advantage under drought conditions.

[1548] Three independent lines were initially tested in a split pot soil drought assay (line and controls together in same pot). One line (#404) showed less severe stress symptoms at the end of dry-down compared to controls.

[1549] Three different lines were later tested in whole pot soil drought assays. Two of these three lines (711 and 717) each showed a better survival than wild type on one of two plant dates. The survival of each of those lines was not statistically distinct from controls on the second plant date.

TABLE 70
RD29A::G1067 drought assay results:

| | | | Mean | Mean | p-value for | Mean | Mean | p-value for |
|---|---|---|---|---|---|---|---|---|
| | Project | | drought | drought score | drought score | survival | survival for | difference |
| Line | Type | Assay type | score line | control | difference | for line | control | in survival |
| 711 | TCST | Whole Pot | 1.8 | 1.6 | 0.94 | 0.42 | 0.25 | 0.0037* |
| 711 | TCST | Whole Pot | 2.2 | 1.2 | 0.072* | 0.34 | 0.30 | 0.44 |
| 704 | TCST | Split Pot | 0.75 | 0.17 | 0.011* | 0.13 | 0.071 | 0.12 |

TCST = Two component super transformation project
Survival = proportion of plants in each pot that survived
Drought scale: 6 (highest score) = no stress symptoms, 0 (lowest score; most severe effect) = extreme stress symptoms
*line performed better than control (significant at P < 0.11)

[1550] Discussion. We have now established two component (RD29A::LexA;opLexA::G1067) lines in the RD29A line 5 background. The majority of these lines showed no consistent alterations in morphology relative to controls. However, some of the transformants did show a small reduction in size and slightly more rounded leaves than controls. At later stages, in some of the second generation (T2) lines, enlarged leaves and slightly delayed flowering were seen, indicating that G1067 can produce similar effects on plant morphology to G1073. In these lines, low constitutive expression produced by the driver line could have triggered such effects. However, it should be noted that none of the lines showed the extreme dwarfing and curled leaves seen in 35S::G1067 lines.

[1551] In plate assays, several lines were more tolerant to severe dehydration, mannitol and sodium chloride. Lines 704 and 711, which generally performed better than wild type in plate stress assays, also performed better than wild type in a soil drought treatment.

[1552] Potential applications. Drought-inducible expression of G1067 can provide improved drought tolerance, without deleterious effects on plant morphology as are seen in 35S::G1067 lines.

G1067 (SEQ ID NO: 119 and 120; Arabidopsis thaliana)—Leaf RBCS3

[1553] Background. The aim of this project was to determine whether expression of G1067 from an RBCS3 promoter, which predominantly drives expression in photosynthetic tissue, would eliminate or alleviate the morphological effects of overexpression. We also wished to test whether RBCS3::G1067 lines show enhanced tolerance to abiotic stress.

[1554] Morphological Observations. Arabidopsis lines in which G1067 was expressed from the RBCS3 promoter (using the two component system) exhibited changes in size, altered leaf shape and in some cases showed slightly delayed flowering, as detailed below.

[1555] Line Details:

[1556] T1 Lines 581-590: all were small, particularly at early stages and exhibited rather rounded short leaves. At later stages, the leaves often became contorted and curled. All lines showed a slight delay in the onset of flowering (about 1-5 days under 24-hour light).

[1557] T1 Lines 621-629: all were slightly small at early stages and had short, round, rather broad leaves. Delayed flowering was not noted in this set of lines.

[1558] T2-587: no consistent differences to wild-type. (on one plant date, this line was slightly early flowering, but the effect was not seen on other dates).

[1559] T2-588: slightly delayed flowering and slightly enlarged curled leaves (this phenotype was only recorded in one of three plantings and could be conditional).

[1560] T2-627: no consistent differences to wild-type. (on one plant date, this line was slightly early flowering, but the effect was not seen on other dates).

[1561] Physiology (Plate assays) Results. Four out of the 10 RBCS3::G1067 lines showed good performance when germinated on plates containing sodium chloride.

[1562] Discussion. We have obtained RBCS3::G1067 lines using a two component approach; these plants were generally small at early stages, had short rounded leaves and flowered slightly late. At later stages of growth, the leaves became contorted and curled, but in occasional lines leaves were broader than those of controls. The appearance of broad leaves, albeit at a low frequency, indicates that G1073 and G1067 might, at least to some extent, be functionally related. In comparison with constitutive G1067 expression, expression from the leaf RBCS3 promoter gave much attenuated morphological effects. Three lines with relatively wild-type morphology yielded improved growth in a NaCl germination assay. However, the results from soil drought assays were rather inconsistent. A single line did show increased tolerance in one run of the experiment, but in a different planting, showed a comparable result to wild-type.

[1563] Potential applications. The utility of the RBCS3::G1067 combination with respect to drought tolerance remains unclear. However, based on the morphological effects seen in these lines, the combination may be used to modify flowering time or leaf shape. Importantly, the increased leaf size seen in these lines demonstrates that the capacity to effect this phenotype is shared by G1073-related proteins and is not specific to G1073 itself.

G1067 (SEQ ID NO: 119 and 120; Arabidopsis thaliana)—Root ARSK1

[1564] Background. The aim of this project was to determine whether expression of G1067 from an ARSK1 promoter, which predominantly drives expression in root tissue, would eliminate or alleviate the detrimental morphological effects of constitutive overexpression, and whether ARSK1::G1067 lines show enhanced tolerance to abiotic stress.

[1565] Morphological Observations. The majority of Arabidopsis lines in which G1067 was expressed from the ARSK1 promoter (via the two component system) displayed no consistent difference in morphology compared to controls. However, a number of the lines showed a reduction in overall size and developed slowly relative to controls.

[1566] T1 Lines Details:

[1567] Lines 341-347: 3/7 (#342, 343, 346) lines were very small, 4/7 lines appeared wild type.

[1568] Lines 401-409: 2/9 (#403, 404) lines were small, 7/9 appeared wild type.

[1569] Lines 481-490: 3/10 (#483, 488, 489) lines were very small, 7/10 appeared wild type.

[1570] T2 line details:

[1571] T2-345: all plants appeared wild type.

[1572] T2-346: 2/6 were tiny, 3/6 were slightly small, 1/6 was wild type.

[1573] T2-347: all plants were small at early stages and developed more slowly than wild type.

[1574] T2-401, T2-402, and T2-406; plants showed no consistent differences to wild-type controls.

[1575] Of the lines submitted for physiological assays, all lines showed segregation on selection plates in the T2 generation that was compatible with the transgene being present at a single locus.

[1576] Physiology (Plate assays) Results. Four out of ten lines were more resistant than wild-type seedlings in a severe dehydration assay. Interestingly, some lines that were not tolerant to dehydration stress had better seedling vigor when germinated on plates containing salt compared to wild-type seedlings.

[1577] Discussion. We have obtained ARSK1::G1067 lines using a two-component approach; the majority (18 out of 26) of these transformants appeared wild type, and displayed no evidence of curled leaves or severe dwarfing. However, 8 of 26 lines showed size reductions and developed more slowly than controls, to various extents.

[1578] ARSK1::G1067 lines have now been tested in plate based stress assays, and four out often lines examined showed enhanced tolerance in a severe dehydration assay. All of these four lines had shown a wild-type phenotype in the morphological screens, demonstrating that G1067 could enhance dehydration stress tolerance without producing obvious negative effects on plant size. Four other ARSK1::G1067 lines showed a wild-type response in the dehydration assay but were more tolerant than controls in an NaCl germination assay.

[1579] Potential applications: Based on the above results, G1067 might be applied to improve tolerance to drought related stress in commercial species. Given the undesirable morphologies that arise from G1067 overexpression via a constitutive promoter, the gene might be optimized for product development by its combination with this or another root-specific promoter.

G2153 (SEQ ID NO: 137 and 138; Arabidopsis thaliana)—Constitutive 35S

[1580] Background. G2153 was included in drought program based on its sequence relatedness to G1073 and its tolerance to osmotic stress in our earlier genomics screens. This gene and G1069 are the most related Arabidopsis homologs of G1073, according to phylogenetic analysis. There have been no data documenting functional characteristics of G2153 in the public domain.

[1581] Morphological Observations. Additional sets of G2153 overexpression lines have now been obtained by both the two component system (P6506, P4524) and a 35S direct promoter fusion construct (P1740).

[1582] The majority of plants produced via each of the two methods exhibited marked alterations in leaf shape; petioles were short and leaf blades were rounded and had a ruffled, curled, appearance compared to wild type. The plants were also generally small, slow developing, flowered much later than controls, and yielded relatively few seeds. These latter results were somewhat comparable to those obtained during our earlier genomics studies, when a considerable number of the 35S::G2153 lines were observed to be small and occasionally to show leaf curling. However, two component lines typically showed the stronger phenotypes, perhaps suggesting that higher levels of G2153 activity were attainable using that system compared to a direct promoter fusion approach.

[1583] In addition to the above effects on leaf shape and size, a minor percentage of the lines showed a phenotype not observed during our earlier genomics study. At early stages, plants possessing this phenotype appeared either wild type, or reduced in size, but at later stages, their lateral organs continued to grow and expand for longer than in wild-type, resulting in leaves and floral organs (particularly petals) becoming markedly enlarged. This phenotype was generally more apparent in the set of direct fusion lines than the two component lines. Details of lines and phenotypes are given below:

[1584] Direct promoter fusion lines: Lines 341-354: considerable size variation was seen at the vegetative stage with #342, 343, 345, 347, 351, and 354 being particularly small with abnormal shaped leaves. At this stage, the remaining plants were slightly small, or wild type. All plants in the set flowered later than wild-type to varying extents. Four of the fourteen lines (#345, 349, 350, 354) showed enlarged organs, and of these, #350 had such effects apparent at the early inflorescence stage, whereas other lines showed the phenotype only towards the end of the life cycle. Line 345 also produced a particularly large quantity of seed.

[1585] (Of the lines submitted for physiological assays, the following had segregation on selection plates in the T2 generation that was compatible with the transgene being present at a single locus: 342, 343, 345, 347, 349, 354. Lines 341, 348, 350, 352 showed segregation that was compatible with insertions at multiple loci.)

[1586] The following lines were examined in the T2 generation:

[1587] T2-352: all small at early stages, late flowering, has rather curled leaves (at margins) and increased rosette biomass at late stages.

[1588] T2-348: 4/6 showed broad leaves at late rosette stage. All were later flowering than control. Some evidence of leaf curling was apparent.

[1589] T2-341: 4/6 showed a mild delay in the onset of flowering, but otherwise, no consistent alterations in morphology were apparent.

[1590] Two component lines: Lines 301-308: all were very small, slow developing, with curled ruffled leaves. None of these lines developed increased biomass versus wild type.

[1591] Lines 321-324: all were very small, slow developing, with curled ruffled leaves. None of these lines developed increased biomass versus wild type.

[1592] Lines 361-365: all were very small, slow developing, with curled ruffled leaves. #362, 365 exhibited enlarged rosettes at late stages.

[1593] Lines 381-383: all were very small, slow developing, with curled leaves.

[1594] Lines 401-411: all were very small, slow developing, and showed curled ruffled leaves. Line 401 exhibited increased biomass at late stages.

[1595] The majority of two component lines displayed severe size reductions and produced few if any seeds.

[1596] Three lines were examined in the T2 generation: T2-401, T2-406, T2-411. In each case, the plants were tiny, had curled leaves, and were very late flowering. Some of these plants died early on, but those that survived recovered at late stages of growth and developed large rosettes relative to controls.

[1597] Flowers from a number of 35S::G2153 (direct promoter-fusion) lines were larger than flowers from wild type.

[1598] Physiology (Plate assays) Results. Overexpression of G2153 in Arabidopsis resulted in seedlings with an altered response to osmotic stress. In a germination assay on media containing high sucrose, G2153 overexpressors had more expanded cotyledons and longer roots than the wild-type controls.

[1599] We have now re-examined a larger number of direct promoter-fusion 35S::G2153 lines. Nine of ten new lines tested outperformed wild type to varying extents in a number of different plate based assays. These included decreased tolerance to NaCl, sucrose, ABA, germination in cold and growth in cold, as well as reduced sensitivity to ABA, relative to wild type. However, seven of the 35S::G2153 lines were rather small and had little root growth.

[1600] Similar phenotypes were obtained with two-component lines and comparable results were seen in the same assays as for the direct fusion lines.

[1601] Physiology (Soil Drought-Clay Pot) Summary.

[1602] Direct promoter fusion lines: 35S::G2153 direct promoter fusion lines showed strongly enhanced survival relative to wild-type in soil drought assays. Four independent lines were tested and three of those lines showed a consistently better rate of survival than wild-type controls. Line 352 showed particularly strong tolerance and exhibited significantly better survival than wild-type on each of the three plant dates on which it was tested. Line 348 exhibited significantly better survival than wild-type on each of the two plant dates when it was tested. Line 343 showed better survival on the one plant date on which it was tested.

TABLE 71
35S::G2153 drought assay results

| | | Mean | Mean | p-value for | Mean | Mean | p-value for |
|---|---|---|---|---|---|---|---|
| | Project | drought | drought | drought score | survival for | survival for | difference in |
| Line | Type | score line | score control | difference | line | control | survival |
| 343 | DPF | 5.3 | 2.6 | 0.0015* | 0.48 | 0.25 | 0.000058* |
| 348 | DPF | 0.50 | 0.10 | 0.13 | 0.093 | 0.021 | 0.019* |
| 348 | DPF | 1.0 | 0.60 | 0.27 | 0.21 | 0.086 | 0.0035* |
| 352 | DPF | 4.0 | 2.6 | 0.13 | 0.55 | 0.25 | 0.00000037* |
| 352 | DPF | 2.1 | 0.10 | 0.0055* | 0.39 | 0.021 | 0.000000063* |
| 352 | DPF | 1.9 | 0.10 | 0.0018* | 0.24 | 0.014 | 0.000025* |

DPF = direct promoter fusion project
Survival = proportion of plants in each pot that survived
Drought scale: 6 (highest score) = no stress symptoms, 0 (lowest score; most severe effect) = extreme stress symptoms
*line performed better than control (significant at P < 0.11)

[1603] Discussion. We have generated lines for both direct fusion and two component constructs. Lines from the two approaches exhibited similar effects. The majority of transformants were small, slow developing and had abnormally shaped leaves. However, a significant proportion of the lines developed enlarged lateral organs (leaves and flowers), particularly at later developmental stages. It should be noted that a greater frequency of deleterious phenotypes was seen among the two-component lines. Since other data indicate that two-component lines have increased expression levels in comparison with direct fusion constructs, this suggests that deleterious morphological effects are dose-dependent.

[1604] Abiotic stress assays have now been performed on a set of the direct fusion and two-component lines. These experiments confirmed our earlier observations that 35S::G2153 lines have enhanced tolerance to abiotic stress. In our latest studies, positive phenotypes were seen in NaCl, sucrose, ABA, and cold stress assays. Three different direct fusion lines also showed a strong performance relative to controls in “whole-pot” soil drought assays. Interestingly, three different two-component lines tested in “split-pot” soil drought assays all performed worse than wild-type, perhaps due to the competition between these slow-growing lines and controls in this format.

[1605] It is particularly interesting that effects similar to those exhibited by 35S::G2153 lines on organ growth and stress tolerance have been obtained with 35S::G1073 and 35S::G2156 lines, indicating that these genes are functionally related.

[1606] Potential applications. Based on the results of our overexpression studies on G2153 and related genes, G2153 is a potential candidate for improvement of drought related stress tolerance in commercial species. Although this work provides further evidence for improved drought tolerance conditioned by members of the AT-Hook family, stress tolerant G2153 lines also had a dramatic flowering delay and morphological effects.

[1607] Based on the developmental effects observed, G2153 could be used to manipulate organ growth and flowering time.

G2156 (SEQ ID NO: 129 and 130; Arabidopsis thaliana)—Constitutive 35S

[1608] Background. G2156 was included in the drought program as a potential paralog to G1073. Based on amino acid sequence, the G2156 protein along with G1067 is phylogenetically more closely related to G1073 than the other members of the study group. There have been no data documenting functional characteristics of G2156 in the public domain.

[1609] Our earlier genomics screen characterized 35S::G2156 lines as having multiple morphological alterations, but did not reveal any enhancement of abiotic stress tolerance. The aim of this study was to re-examine the effects of G2156 overexpression, particularly with respect to abiotic stress responses.

[1610] Morphological Observations. Additional sets of G2156 overexpression lines have now been obtained by both the two component system (P6506, P4418) and a 35S direct promoter fusion construct (P1721).

[1611] The majority of plants produced via each of the two methods exhibited marked alterations in leaf shape; petioles were short and leaf blades were rounded and had a ruffled, curled appearance. The plants were also generally very small, slow developing, flowered later than controls, and yielded relatively few seeds. Occasional lines, though, showed early flowering. These results were comparable to those obtained during our earlier genomics studies. However, two component lines typically showed the stronger phenotypes, perhaps suggesting that higher levels of G2156 activity were attainable using that system compared to a direct promoter fusion approach.

[1612] In addition to the above effects on leaf shape and size, a minor percentage of the lines showed a phenotype not observed during our earlier genomics study. At early stages, plants possessing this phenotype appeared either wild type, or reduced in size, but at later stages, their lateral organs continued to grow and expand for longer than in wild-type, resulting in leaves and floral organs particularly petals) becoming markedly enlarged. This phenotype was generally more apparent in the set of direct fusion lines than the two component lines.

[1613] Line Details:

[1614] Direct promoter fusion lines. T1 lines 421-440: considerable size variation was seen at the vegetative stage with #423, 424, 425, 426, and 427 being particularly small with abnormal shaped leaves. At this stage, the remaining plants were slightly small, or wild type. Many of the plants in the set flowered later than wild type to varying extents, but two lines, T1-433 and T1-439 were somewhat early flowering. Five of the fourteen lines (#421, 428, 436, 437, 438) showed enlarged organs. Unfortunately (due to a lab mishap) seed from lines #436, 437, 438 were not obtained.

[1615] T2-421: all showed broad curled leaves, were small at early stages, and flowered late.

[1616] T2-423: all very small and pale at early stages, showed highly curled leaves and flowered late.

[1617] T2-424: all slightly small at early stages with mild leaf curling. Flowering was slightly delayed and leaves were slightly enlarged at late stages.

[1618] T2-425: all showed accelerated flowering and were pale in coloration.

[1619] (Of the lines tested in physiological assays, the following had a segregation on selection plates in the T2 generation that was compatible with the transgene being present at a single locus: 424, 425, 435. Lines 421, 422, 428, 429, 434, 432 and 431 showed segregation that was compatible with insertions at multiple loci.)

[1620] Two component lines. T1 lines 301-307: all were tiny with curled leaves and died at early stages.

[1621] T1 lines 321-326: all were tiny with curled leaves, and slow developing. #321, 325, 326 died at early stages

[1622] T1 lines 381: only a single plant was obtained in this set, which was tiny, showed curled leaves and developed very slowly.

[1623] T1 lines 401-403: #402 and 403 were tiny and late flowering. #401 appeared wild type at early stages, but later developed enlarged leaves and flowers.

[1624] Since the majority of two component lines displayed severe size reductions and produced few if any seeds, lines were not available for soil drought assays.

[1625] Physiology (Plate assays) Results. 35S::G2156 seedlings had previously displayed a wild-type response in physiological assays. We have now examined a greater number of lines.

[1626] Eight out of ten new 35S::G2156 direct fusion lines showed a good performance versus wild-type when germinated on plates containing sodium chloride. In addition, one line (425) had more vigor when analyzed on both heat germination and cold growth plates. Another line (421) performed better than wild-type on a germination assay on plates containing sucrose.

[1627] Three 35S::G2156 two-component lines were also tested and tolerance was noted in sucrose and ABA germination assays and in a cold growth assay.

[1628] Physiology (Soil Drought-Clay Pot) Summary. Three independent 35S::G2156 (direct fusion) lines have been tested in soil drought assays. Two of these lines showed a significantly better performance than wild-type on one of two dates on which a “whole pot” assay with moderate drought conditions was run. Both of the lines showed a comparable performance to wild type on a second plant date. However, it should be noted that on the second date, the plants suffered a somewhat harsher treatment. Thus, this gene might confer an advantage under moderate but not severe drought conditions.

TABLE 72
35S::G2156 drought assay results:

| | | Mean | Mean | p-value for | Mean | Mean | p-value for |
|---|---|---|---|---|---|---|---|
| | Project | drought | drought score | drought score | survival for | survival for | difference in |
| Line | Type | score line | control | difference | line | control | survival |
| 421 | DPF | 0.10 | 0.10 | 1.0 | 0.036 | 0.046 | 0.75 |

[1629] Discussion. We have generated lines using both direct fusion and two component constructs. Lines from the two approaches exhibited similar effects. The majority of transformants were small, slow developing and had abnormally shaped leaves. However, a significant proportion of the lines developed enlarged lateral organs (leaves and flowers), particularly at later developmental stages. It should be noted that a greater frequency of deleterious phenotypes was seen among the two-component lines. Since other data indicate that two-component lines have increased expression levels in comparison with direct fusion constructs, this suggests that deleterious morphological effects are dose-dependent.

[1630] Plate-based physiology assays revealed an effect not observed during our earlier studies: 35S::G2156 lines showed enhanced tolerance in a germination assay on sodium chloride media. An enhanced performance was also seen in ABA, sucrose, and chilling growth assays. Three lines (#421, 424 and 425) were tested in soil drought assays, with the former two lines performing better than controls under mild drought stress, while the latter line performed worse than controls under both mild and more severe drought treatment. In contrast to lines 421 and 424 which flowered late and had curled leaves, line 425 flowered early and had pale leaves.

[1631] It is particularly interesting that effects similar to those exhibited by 35S::G2156 lines on organ growth and stress tolerance have been obtained with 35S::G1073 and 35S::G2153 lines, indicating that these genes are functionally related.

[1632] Potential applications. Based on the results of our overexpression studies on G2156 and related genes, G2156 is a potential candidate for improvement of drought related stress tolerance in commercial species. Although this work provides further evidence for improved drought tolerance conditioned by members of the AT-Hook family, stress-tolerant lines also had delayed flowering and altered morphology.

[1633] Based on the developmental effects observed, G2156 could be used to manipulate organ growth and flowering time.

G2156 (SEQ ID NO: 129 and 130; Arabidopsis thaliana)—Root ARSK1

[1634] Background. Many of the 35S::G2156 lines have previously been shown to have marked reductions in overall size and a range of undesirable effects such as slow growth, curled leaves, altered coloration, and poor fertility. In our original genomics experiments, overexpression lines with very severe morphological changes could not be tested in stress assays. The aim of this project was to determine whether expression of G2156 from an ARSK1 promoter, which predominantly drives expression in root tissue, would eliminate or alleviate the undesirable morphological effects of overexpression. We also wished to test whether G2156, when combined with an ARSK1 promoter, would result in increased abiotic stress tolerance.

[1635] Morphological Observations. The majority of Arabidopsis lines in which G2156 was expressed from the ARSK1 promoter (via the two component system) displayed no consistent difference in morphology compared to controls.

[1636] A total of 60 T1 lines from three different batches were examined, as detailed below:

[1637] Lines 361-380: 5/20 (#361, 362, 366, 367, 364) lines were small, 15/20 appeared wild type.

[1638] Lines 481-500: all showed wild-type morphology, but 12/20 (#483, 484, 485, 486, 487, 488, 489, 490, 493, 495, 499, 500) displayed a marginal delay in the onset of flowering (this effect did not recapitulate when three of those lines were examined in the T2 generation (see below).

[1639] Lines 601-620: all appeared wild type.

[1640] Six different T2 populations were also morphologically examined:

[1641] T2-364: all plants were wild type.

[1642] T2-365: all appeared wild type.

[1643] T2-368: 3/6 were small, 3/6 were slow developing.

[1644] T2-484: all appeared wild type.

[1645] T2-485: all appeared wild type.

[1646] T2-489: all appeared wild type.

[1647] T2-488: all appeared wild type.

[1648] T2-494: all appeared wild type.

[1649] Of the lines submitted for physiological assays, all showed a segregation on selection plates in the T2 generation that was compatible with the transgene being present at a single locus.

[1650] Physiology (Plate assays) Results. Four out of ten ARSK1::G2156 lines performed better than wild-type in a severe plate based drought assay.

[1651] Discussion. We have obtained ARSK1::G2156 lines using a two component approach; three independent batches of transformants were obtained. Approximately half of the lines from one of these batches displayed a very marginal delay in the onset of flowering, but the majority of lines displayed no obvious differences in growth and development to wild-type controls. Thus, use of a root promoter in combination with G2156 largely eliminated the undesirable morphologies produced by overexpression of that gene with the 35S promoter.

[1652] ARSK1::G2156 lines were tested in plate based assays; four out often lines performed better than controls in a severe dehydration assay. This is of particular interest since a comparable result was obtained in the ARSK1 experiment for the closely related gene, G1067, highlighting the fact that these two genes likely have comparable functions.

[1653] The above dehydration assay results indicate that an increase in G2156 activity can confer abiotic stress tolerance. However, two of three ARSK1::G2156 lines tested performed more poorly than controls in a soil drought assay. These results a more complex relationship than expected between the severe dehydration assay and the soil drought assay.

[1654] Potential applications. Based on the above results, G2156 may be used to improve tolerance to abiotic stress in commercial species.

G2156 (SEQ ID NO: 129 and 130; Arabidopsis thaliana)—Leaf RBCS3

[1655] Background. The aim of this project was to determine whether expression of G2156 from an RBCS3 promoter, which predominantly drives expression in photosynthetic tissue, would eliminate or alleviate the undesirable morphological effects of overexpression. We also wished to test whether G2156, when combined with an RBCS3 promoter, would result in increased abiotic stress tolerance.

[1656] Morphological Observations. Arabidopsis lines in which G2156 was expressed from the RBCS3 promoter (using the two component system) exhibited changes in size, altered leaf shape and in some cases showed delayed flowering. In particular, a substantial number of the lines developed enlarged leaves at later stages of growth. Details of lines and phenotypes are provided below:

[1657] T1 Lines 541-560: all were small at early stages and displayed rounded leaves with short petioles. Ten of the twenty lines (543, 544, 545, 546, 548, 552, 554, 557 558, 559) flowered later that controls to various extents and ten of the twenty lines (543, 544, 545, 548, 554, 550, 551, 554, 555, 557) developed distinctly enlarged leaves.

[1658] T1 Lines 581-587: all were small at early stages and displayed rounded leaves with short petioles. All showed varying degrees of late flowering, with #585 being most extreme. #584, 585, 586, 587 developed enlarged leaves.

[1659] Three T2 populations were later examined:

[1660] T2-543; all appeared wild type.

[1661] T2-544; all showed broad leaves.

[1662] T2-554; all had broad rather large curled leaves and enlarged flowers.

[1663] Physiology Results. Three out of ten lines of RBCS3::G2156 were less sensitive to ABA in a germination assay compared with wild-type control seedlings

[1664] Discussion. We have obtained RBCS3::G2156 lines using a two component approach. At early stages, these plants were slightly small and showed rather rounded leaves. However, at later stages, 50% of the lines developed enlarged leaves and showed increased rosette biomass compare to controls. The majority of lines showing this phenotype also displayed a slight delay in the onset of flowering.

[1665] Interestingly, large leaves were also observed when 35S::G2156 lines were re-examined. However, leaf enlargements were seen at lower frequency in the 35S::G2156 study than in the RBCS3::G2156 study. Additionally many of the lines from the 35S::G2156 experiment were very small and had multiple defects; such effects appear to have been largely avoided by use of the RBCS3 promoter. These differences could either be due to the possibility that differential expression solely in mesophyll cells does not produce toxic effects, or because of the different expression levels obtained using the two different promoters. The increased leaf size seen in this study was comparable to the effects produced by increased G1073 activity and serves to strengthen the conclusion that the two genes have related roles.

[1666] RBCS3 produces expression in relatively mature, photosynthesizing leaf tissue. Thus, G2156 when expressed at a relatively late stage of leaf development produced developmental signals that maintained leaf growth. However, there remains the possibility that G2156 triggered the production of developmental signals in mature leaves that were then transmitted to younger leaf primordia, and committed them to overgrowth at an early stage.

[1667] In plate based assays, a lower frequency of positive results were seen than with the 35S lines. However, RBCS3::G2156 lines did show an enhanced performance on ABA germination plates.

[1668] Potential applications. The RBCS3::G2156 combination produced a lower frequency of deleterious effects than the 35S::G2156 combination, and thus G2156 under the regulatory control of the RBCS3 promoter may be used to produce plants that are tolerant to drought and other abiotic stresses. However, the combination also showed less compelling results than 35S lines in drought-related stress assays.

G2157 (SEQ ID NO: 143 and 144; Arabidopsis thaliana)—Constitutive 35S

[1669] Background. G2157 (AT3G55560) is an Arabidopsis AT-hook protein that is a potential homolog of G1073. During the initial genomics screens, 35S::G2157 lines were found to show various pleiotropic developmental abnormalities such as dwarfing and changes in leaf shape. We have recently begun to analyze additional 35S::G2157 Arabidopsis lines as part of the G1073-related studies, since tomato lines overexpressing G2157 exhibited an increased biomass phenotype in a field screen.

[1670] Morphological Observations. A total of nineteen new 35S::G2157 lines (#301 and #321-338) have been obtained. The majority of these lines (all except #321, 326, 330, 338) showed a morphological phenotype: the plants were rather small and light in coloration at the rosette stage and exhibited broad rounded leaves with short petioles and rather wrinkled margins. Several lines have developed increased biomass and enlarged rosette leaves versus controls at later stages. Some of these plants have broad, curling, ruffled leaves that roll up at edges, slightly darker coloration, and are slightly late in developing.

[1671] Physiology (Plate assays) Results. Three of ten lines were more tolerant to severe desiccation in plate-based assays than were wild-type controls.

[1672] Discussion. We have now obtained new sets of 35S::G2157 lines. These plants show very similar morphologies to overexpression lines for some of the other genes in the G1073 study group, particularly G2156 and G2153. 35S::G2157 lines were typically small at early stages, and had short, broad leaves with curled margins. At later stages, an increase in leaf size and biomass became apparent relative to wild-type.

[1673] Potential applications. Based on the morphological changes seen in 35S::G2157 lines, this gene could be applied to manipulate plant development, enhance biomass, and improve drought tolerance.

G3399 (SEQ ID NO: 117 and 118; Oryza sativa)—Constitutive 35S

[1674] Background. G3399 is a closely-related ortholog of G1073. Phylogenetic analysis identifies G3399 along with G3400 as being the most closely related rice homologs to G1073 (in this study). The aim of this project is to determine whether overexpression of G3399 in Arabidopsis produces comparable effects to those of G1073 overexpression.

[1675] Morphological Observations. Overexpression of G3399 produced marked changes in Arabidopsis morphology including alterations in seedling vigor, size, leaf shape and flowering time. A marked increase in organ size was observed in a significant number of the lines.

[1676] An initial set of 35S::G3399 lines (321-340), harbored a construct P21269, which contained a one base pair sequence change (leading to an amino acid substitution, see seq. details) in the G3399 clone relative to the wild-type allele of the gene. Later sets of lines (381-400 and 401-420) were transformed with P21465, which carried an error-free G3399 clone. Both constructs produced similar morphological effects, as detailed below. Initially, it appeared as though P21269 lines showed a lower rate of dwarfing, but having obtained a second set of P21465 lines (401-420), this no longer appears to be the case.

[1677] Lines 321-340 (P21269): at the earliest stages, considerable size variation was apparent, with many the lines being slightly smaller than controls; this effect was particularly seen in #326, 327, 328, 329, 333, 336, 337, 339, 340. Two lines (#326 and 337) were very tiny and showed contorted curled leaves. Enlarged leaves and flowers were observed in eight of twenty lines (#323, 325, 331, 332, 334, 335, 336, 340), and this effect first became apparent at the end of the rosette stage. In addition to the increased organ size, a number of the lines also flowered late: #324, 331, 332, 334, 340.

[1678] Lines 381-400 (P21465): at the earliest stages, all lines appeared very small with abnormally shaped curled contorted leaves (#382, 384, 386, 394, 397, 398 were particularly strongly affected). At later stages of growth, enlarged leaves were apparent in 4/20 lines: #381, 389, 390 and 395.

[1679] Line 401-420 (P21465): at the seedling stages, 4/20 (#403, 407, 410, 413) lines displayed enhanced vigor and were larger than controls 401 is dead. Some lines (#405, 407-409, 411, 412, 417, 419) also had long, narrow cotyledons. Later, the majority of lines (402, 403, 404, 406, 407, 410, 411, 412, 413, 415-420) showed large, broad, slightly curled rosette leaves. A minority of lines (#408, 409, 414) were severely dwarfed and yellow in coloration with highly contorted leaves.

[1680] T2408; all plants were markedly small at early stages. AU were pale, late flowering, and showed round leaves with highly curled contorted margins.

[1681] Physiology (Plate assays Results. An initial set of 35S::G3399 lines (321-340), harbored a construct P21269, which contained a one base pair sequence change (leading to an amino acid substitution, see seq. details) in the G3399 clone relative to the wild-type allele of the gene. Several lines with this construct had more root hairs than controls.

[1682] Later sets of lines (381400 and 401-420) were transformed with P21465, which carried an error-free G3399 clone. Both constructs produced similar morphological effects, as detailed below. This construct also produced plants with more extensively developed roots (i.e., more root mass) and/or more root hairs. Three of ten of the P21465 lines also showed a marginally better performance than controls in a severe dehydration assay.

[1683] Initially, in morphology assays, it appeared as though P21269 lines showed a lower rate of dwarfing, but having obtained a second set of P21465 lines (401-420), this no longer appears to be the case.

[1684] Physiology (Soil Drought-Clay Pot) Summary. 35S::G3399 lines containing P21465 (an error-free G3399 clone) showed significantly better survival than controls in soil drought assays.

[1685] Three independent lines were tested; line 408 showed better survival on each of two plant dates, whereas line 412 showed better survival on one of two plantings.

TABLE 73
35S::G3399 drought assay results:

| | | | Mean | | | | |
|---|---|---|---|---|---|---|---|
| | | Mean | drought | p-value for | Mean | Mean | |
| | Project | drought | score | drought score | survival | survival | p-value for difference in |
| Line | Type | score line | control | difference | for line | for control | survival |
| 408 | DPF | 1.4 | 0.80 | 0.14 | 0.20 | 0.11 | 0.033* |
| 408 | DPF | 3.7 | 1.3 | 0.00052* | 0.75 | 0.19 | 0.0000000000000000021* |
| 412 | DPF | 1.0 | 1.2 | 0.54 | 0.21 | 0.15 | 0.32 |
| 412 | DPF | 2.1 | 0.50 | 0.0026* | 0.46 | 0.11 | 0.000000079* |

DPF = direct promoter fusion project
Drought scale: 6 (highest score) = no stress symptoms, 0 (lowest score; most severe effect) = extreme stress symptoms
*line performed better than control (significant at P < 0.11)

[1686] Discussion. 35S::G3399 lines have been obtained containing either of two different constructs. Both constructs produced similar morphological phenotypes; many of the lines were small at early stages, showed alterations in leaf shape, and had slightly delayed flowering. However a significant number of lines developed enlarged lateral organs (leaves and flowers), particularly at later stages.

[1687] 35S::G3399 lines did not exhibit a striking overall improvement in stress tolerance in a number of the plate-based abiotic stress assays. However, three lines were more tolerant than controls in a severe dehydration assay, and a number of the lines showed more vigorous root development (increase root mass and root hair density) than wild-type when grown on control plates in the absence of a stress treatment. Importantly, two lines that exhibited improved performance in the severe dehydration assay each performed better than controls in at least one soil-based drought assay. Each of these lines (#408 and #412) produced dwarf plants, to varying degrees. Line #415, which had increased organ size (similar to results found with 35S::G1073 lines) was tolerant to dehydration in a plate assay but not to drought in a soil-based assay. The results with this rice gene demonstrate that enhanced drought tolerance in soil based assays for the G1073 group, is separable from the increased biomass phenotype that is obtained with G1073 itself.

[1688] Potential applications. Overexpression of G3399 in Arabidopsis produced both alterations in organ size, as well as enhanced stress tolerance, as was found with overexpression of G1073. These data show that proteins with a comparable activity to G1073 exist in monocots. Thus, G3399 may be used in monocots to regulate these traits. The current results do not indicate that G3399 offers any better utility for producing stress-tolerant plants without morphological alterations compared to G1073.

G3400 (SEQ ED NO: 123 and 124; Oryza sativa)—Constitutive 35S

[1689] Background. G3400 is a rice ortholog of G1073. Phylogenetic analysis identifies G3400 along with G3399 as being the most closely related orthologs to G1073 in this study. The aim of this project is to determine whether overexpression of G3400 in Arabidopsis produces comparable effects to those of G1073 overexpression.

[1690] Morphological Observations. 35S::G3400 lines exhibited highly pleiotropic effects on morphology, and showed changes in overall size, organ size, coloration, leaf shape, fertility and flowering time. At early stages most lines were severely dwarfed; some lines developed enlarged leaves and rather bushy inflorescences at late stages.

### Line Details

[1691] Line set 301-320: zero transformants obtained.

[1692] T1 lines 321-325: all showed a reduction in size at early stages, had short rounded curled leaves, and were slow developing compared to controls. These effects were strongest in line #321. Later, however, from the mid-inflorescence phase onwards, two of the lines (#322 and 323) developed leaves that were distinctly broader than in wild type. The flowers of these lines also were large compared to those of controls (seed from 3 lines: 321-323).

[1693] T1 line set 341-360: zero transformants obtained.

[1694] T1 lines 361-362; two tiny deformed transformants recovered. Both died at early stages.

[1695] T1 lines 381-400; at early stages all lines were tiny and many had deformed cotyledons and contorted, cup-shaped leaves. By a late stage of development #381, 383, 385, 386, 389, 392, 396, and 400 developed broad, large, curly leaves, and rather bushy inflorescences. The flowers on some plants also were somewhat large.

[1696] T2-321: all tiny with pale contorted leaves at all stages of development.

[1697] T2-332 & T2-323: all small, with pale, curled, upright, serrated leaves and delayed flowering. At later stages, leaves became rather enlarged, and inflorescences were bushy and had short internodes.

[1698] All three of the 35S::G3400 line tested out-performed controls in germination and growth assays involving cold temperatures. It was also noted that 35S::G3400 seedlings were pale with long narrow leaves.

[1699] Physiology (Soil Drought-Clay Pot) Summary. Two out of three independent 35S::G3400 lines showed a significantly better performance than controls in a single run of a split pot soil drought assay (plants from lines and controls together in same pot).

TABLE 74
35S::G3400 drought assay results:

| | | Mean | Mean | p-value for | Mean | Mean | p-value for |
|---|---|---|---|---|---|---|---|
| | Project | drought | drought score | drought score | survival for | survival for | difference in |
| Line | Type | score line | control | difference | line | control | survival |
| 322 | DPF | 0.58 | 0.17 | 0.031* | 0.25 | 0.17 | 0.080* |
| 323 | DPF | 0.92 | 0.25 | 0.013* | 0.33 | 0.11 | 0.000073* |

DPF = direct promoter fusion project
Survival = proportion of plants in each pot that survived
Drought scale: 6 (highest score) = no stress symptoms, 0 (lowest score; most severe effect) = extreme stress symptoms
*line performed better than control (significant at P < 0.11)

[1700] Discussion. 35S::G3400 overexpression lines were obtained at a low frequency, suggesting that the gene might have lethal effects when overexpressed at high levels. The lines that were obtained were small, slow developing, had curled leaves and showed complex developmental abnormalities at early stages. However, at later stages, some of the lines formed enlarged leaves and flowers.

[1701] It should be noted that the morphologically similar effects caused by overexpression of this rice gene versus G1073 and the Arabidopsis paralogs, indicate that they likely have related functions.

[1702] Three 35S::G3400 lines, all of which contained small plants with altered leaf morphology (contorted, serrated edges), were tested in plate-based abiotic stress assays and soil-based drought assays. All three lines showed improved performance in cold germination and growth assays, and two of the three lines had improved performance in the soil drought assays. This demonstrates that the stress tolerance phenotypes obtained with the G1073-group are independent of the increased organ growth phenotype that is most prevalent in G1073 lines.

[1703] Potential applications. Overexpression of G3400 in Arabidopsis produced both alterations in organ size, as well as enhanced stress tolerance, as was found with overexpression of G1073. These data show that proteins with a comparable activity to G1073 exist in monocots. Thus, G3400 may be used in monocots to regulate these traits. The current results do not indicate that G3400 offers any better utility for producing stress-tolerant plants without morphological alterations compared to G1073, and that if G3400 is used, it might need to be optimized by use of a non-constitutive promoter.

G3401 (SEQ ID NO: 135 and 136; Oryza sativa)—Constitutive 35S

[1704] Background. G3401 is a closely-related rice homolog of G1073. G3401 is more distantly related to G1073 than the rice sequences G3399 and G3400. G2153 and G1069 are the Arabidopsis sequences most closely related to G3401. The aim of this project was to determine whether overexpression of G3401 in Arabidopsis produces comparable effects to those of G1073 overexpression.

[1705] Morphological Observations. 35S::G3401 lines exhibited a pleiotropic morphology and showed alterations in leaf size, leaf shape, flowering time and overall plant size.

### Line Details

[1706] T1 lines 341-352:

[1707] The phenotypes seen in this batch of plants were rather variable, but alterations in size and leaf morphology were apparent. At the seedling stage, 6/12 plants (343, 345, 346, 349, 351, 352) were distinctly small and possessed rather narrow cotyledons. At this stage the other lines appeared wild type. Later, considerable size variation and changes in leaf shape were noted; in particular lines #343, 345, 346, 349 were tiny with rounded leaves. A number of lines also grew rather more slowly and bolted later than in wild type: #342, 347, 351, 352. A single plant (#344) was noted to have slightly larger leaves than controls, at the late rosette stage, but this effect was subtle.

[1708] Three T2 populations were examined:

[1709] T2-342, T2-347, T2-352; all were slightly small, showed delayed flowering and developed broad, rounded leaves.

[1710] Physiology (Plate assays) Results. 35S::G3401 seedlings were more tolerant to sucrose than controls in germination assays.

[1711] Physiology (Soil Drought-Clay Pot) Summary. Two out of three independent 35S::G3401 lines showed a significantly better performance than controls in a single run of a split pot soil drought assay (plants from lines and controls together in same pot).

TABLE 75
35S::G3401 drought assay results:

| | | Mean | Mean | p-value for | Mean | Mean | p-value for |
|---|---|---|---|---|---|---|---|
| | Project | drought | drought score | drought score | survival for | survival for | difference in |
| Line | Type | score line | control | difference | line | control | survival |
| 347 | DPF | 1.8 | 0.75 | 0.056* | 0.35 | 0.13 | 0.022* |
| 352 | DPF | 2.1 | 0.50 | 0.0084* | 0.42 | 0.15 | 0.0055* |

DPF = direct promoter fusion project
Survival = proportion of plants in each pot that survived
Drought scale: 6 (highest score) = no stress symptoms, 0 (lowest score; most severe effect) = extreme stress symptoms
*line performed better than control (significant at P < 0.11)

[1712] Discussion. Twelve 35S::G3401 T1 lines were obtained-these plants showed a range of developmental changes including reduced size, slow growth, and altered leaf shape. A single line exhibited slightly enlarged leaves at late stages.

[1713] Three 35S::G3401 T2 lines were tested in soil-based drought assays. Lines #347 and #352 each performed better than controls, whereas line #342 performed similarly to controls. It is noteworthy that line #342 did not perform better than controls in any plate-based stress assay, whereas lines #347 and #352 performed better than controls in salt and high sucrose germination assays and soil-based drought assays, and line #352 also performed better in cold germination assays. AU three T2 lines were slightly small, showed delayed flowering and developed broad, rather rounded leaves. These results are very similar to those obtained with G2153, in terms of both morphological impact and stress tolerance.

[1714] Potential applications. These data indicate that G3401 could be used to modify stress tolerance in crop plants, and indicate that proteins with comparable activities to G2153 and G1073 are present in monocots. It will be useful to understand the relationship between G3401 protein expression level, morphological effect and stress effects in order to better optimize drought tolerance in crop plants while maintaining a wild-type morphology.

G3407 (SEQ ID NO: 133 and 134; Oryza sativa)—Constitutive 35S

[1715] Background. G3407 is a rice gene that is related to G1073. Phylogenetic analysis indicates that G3407 is most closely related to the Arabidopsis genes G1075 and G1076. The aim of this project was to determine whether overexpression of G3407 in Arabidopsis produces comparable effects to those of G1073 overexpression.

[1716] Morphological Observations. 35S::G3407 transformants exhibited an increase in size at the seedling stage compared to wild type controls, but at later stages appeared wild type. This effect was observed in approximately 50% of the primary transformants from a single set of T1 lines, as detailed below:

[1717] Lines 321-331: 5 out of 11 seedlings showed the above effects. The seedlings appeared to have cotyledons vertically oriented relative to wild-type, indicating that they might have altered light responses. At all other stages of development, however, no consistent differences in morphology to wild-type were observed.

[1718] Three lines were examined in the T2 generation and the majority seedlings from one of these (#302) were noted to be large at the 7 day stage. Occasional seedlings from the T2-301 population were also noted to be large.

[1719] It should be noted that transformants were obtained at only a relatively low frequency with this gene, and that, for unknown reasons, zero lines were isolated in each of two other selection attempts.

[1720] Discussion. 35S::G3407 seedlings showed a marked increase in size at early stages relative to wild-type. However, at later stages 35S::G3407 lines appeared wild type. It should be noted that we have observed increased seedling vigor with 35S::G1073 lines and in overexpression lines for other genes from the study group. Thus, G3407 appears to share some degree of activity with other G1073-like proteins.

[1721] 35S::G3407 lines did not exhibit improved performance in any plate-based abiotic stress tolerance assays. However, relatively few transformants were obtained, suggesting that high level expression might be lethal, and that the recovered transformants may all have been expressing G3407 at a low level.

[1722] Potential applications. 35S::G3407 lines showed a marked increase in size at early stages, indicating that this gene may be used to enhance seedling vigor. This trait has enormous value for commercial crops; increasing the survivability of seedlings in the field can increase yield potential.

G3456 (SEQ ID NO: 131 and 132; Glycine max)—Constitutive 35S

[1723] Background. G3456 was included in the drought program as a soy AT-Hook gene closely related to G1073. The aim of this project was to determine whether overexpression of G3456 in Arabidopsis produces comparable effects to those of G1073 overexpression.

[1724] Morphological Observations. 35S::G3456 lines exhibited alterations in overall size, coloration, inflorescence architecture, leaf shape, and flowering time. In particular, at later stages of growth, a significant number of lines developed enlarged leaves and displayed increased biomass and delayed senescence relative to wild type controls.

[1725] Line Details:

[1726] T1 Lines 321-337: at early stages these plants appeared wild type. However, 3/17 lines (#329, 334, 335) were slightly small, had short internodes, and displayed curled leaves relative to controls. Later in development, four of seventeen lines (#323, 325, 328, 332) exhibited substantially larger rosettes than controls and also were dark in coloration. These plants also showed a slight delay in the onset of flowering.

[1727] T1 Lines 341-350: 2/10 lines (#348 and 350) displayed noticeably enlarged leaves. All lines were rather dark at late stages and had slightly short inflorescence internodes leading to a somewhat bushy architecture. Occasional plants, such as #349, exhibited floral defects.

[1728] T1 Lines 361-380: all plants were slightly larger and darker than controls at later stages. At early stages, these lines were wild type in appearance.

[1729] Three lines were also examined in the T2 generation:

[1730] T2-326: all were small at early stages with cupped cotyledons and leaf curling. All were slow growing, but by late stages had developed noticeably larger leaves than wild type. Senescence was also delayed in these plants.

[1731] T2-331: all were small at early stages with cupped cotyledons and leaf curling. All were slow growing and were rather short, bushy, and exhibited delayed senescence compared to wild type.

[1732] T2-337: all were late flowering, developed dark green, enlarged leaves, and senesced later than controls.

[1733] Physiology (Plate assays) Results. 35S::G3456 seedlings showed enhanced tolerance to sodium chloride in a germination assay and during chilling conditions in a growth assay (based on the lack of anthocyanin production). It should be noted that some of the 35S::G3456 seedlings were also observed to be small and vitrified on control plates, in the absence of stress treatments.

[1734] Physiology (Soil Drought-Clay Pot) Summary. Overexpression of G3456 produced a marked enhancement of drought tolerance in Arabidopsis. Three independent lines were tested in soil drought assays. Two of these lines (#331 and 337) showed significantly better survival than controls in each of two different plantings.

TABLE 76
35S::G3456 drought assay results:

| | | | Mean | | | | |
|---|---|---|---|---|---|---|---|
| | | Mean | drought | p-value for | Mean | Mean | |
| | Project | drought | score | drought score | survival | survival | |
| Line | Type | score line | control | difference | for line | for control | p-value for difference in survival |
| 331 | DPF | 4.4 | 1.2 | 0.00019* | 0.95 | 0.17 | 0.000000000000000000000023* |
| 331 | DPF | 3.5 | 1.4 | 0.0041* | 0.64 | 0.17 | 0.000000000000034* |
| 337 | DPF | 3.1 | 0.80 | 0.00025* | 0.54 | 0.071 | 0.00000000000031* |
| 337 | DPF | 3.0 | 1.0 | 0.014* | 0.56 | 0.12 | 0.0000000000014* |

DPF = direct promoter fusion project
Survival = proportion of plants in each pot that survived
Drought scale: 6 (highest score) = no stress symptoms, 0 (lowest score; most severe effect) = extreme stress symptoms
*line performed better than control (significant at P < 0.11)

[1735] Discussion. 35S::G3456 lines exhibited a number of morphological alterations including changes in leaf morphology, size, and inflorescence architecture. In addition, a number of the lines showed delayed flowering, dark coloration, delayed senescence, and exhibited larger organs at later stages of development. It should be noted that these developmental effects were similar to those produced by Arabidopsis genes from the G1073 study group.

[1736] Overexpression of G3456 conferred improved abiotic stress responses, as some 35S::G3456 lines exhibited improved performance in high salt germination and in chilling growth assays. Three lines were tested in the soil drought assay, and two of the three lines had consistently, and very significantly, improved drought tolerance. Based on these results, G3456 has a similar activity to the Arabidopsis genes from the study group.

[1737] Potential applications. Overexpression of G3456 can provide effective drought tolerance, and is a good candidate for improvement of drought tolerance in crops. However, like G1073, substantial morphological effects are associated with G3456 overexpression, including delayed senescence (that is known to be problematic in 35S::G1073 soybean).

[1738] The developmental effects above indicate that the gene could be used also to modify traits such as flowering time, and organ size. The dark coloration exhibited by some of the lines could indicate increased chlorophyll levels; G3456 might therefore also impact photosynthetic capacity, yield, and nutritional value.

G3459 (SEQ ID NO: 121 and 122; Glycine max)—Constitutive 35S

[1739] Background. G3459 was included in the drought program as a soy AT-Hook gene related to G1073. The aim of this project was to determine whether overexpression of G3459 in Arabidopsis produces comparable effects to those of G1073 overexpression.

[1740] Morphological Observations. Overexpression of G3459 produced a spectrum of effects on Arabidopsis growth and development.

[1741] The majority of transformants exhibited morphological abnormalities including dwarfing, abnormally-shaped, curled leaves and cotyledons, slow growth, delayed flowering, short internodes, floral defects (such as failure of stamen development), and changes in coloration and branching pattern. At later stages, some of the lines were observed to develop rather broad rounded leaves.

[1742] A total of 36 lines (301-313, 321-335, 341-345, 361-373) were obtained, spanning four different plantings. The above phenotypes were observed, to varying extents in all of the transformants.

[1743] Physiology (Plate assays) Results. Five out of ten 35S::G3459 lines were more tolerant to sodium chloride in a germination assay. Another group of lines was more tolerant to heat in a germination assay. A further group of lines was more tolerant to cold temperatures during a growth assay; one line in this group had enhanced tolerance to sodium chloride, while two other lines in this group had enhanced heat tolerance on germination.

[1744] Discussion. 35S::G3459 lines produced adverse effects on plant growth and development, resulting in dwarfing, abnormally-shaped curled leaves and cotyledons, and other structural defects. At later stages, some of the lines exhibited delayed flowering and enlarged leaves, indicating that the G3459 protein shared some degree of activity with other proteins from the G1073 study group. However, severe floral defects were seen in 35S::G3459 lines. Few seed were obtained, suggesting that constitutive overexpression of G3459 is toxic in Arabidopsis. No soil drought assay was performed. However, improved tolerance to sodium chloride and heat germination, as well as seedling chilling tolerance, were observed in plate abiotic stress assays.

[1745] Potential applications. Overexpression of G3459 causes developmental changes and thus the gene may be used to regulate morphological traits. Thus, G3459 may be used to enhance abiotic stress tolerance traits.

[1746] Background. G3460 is a soy protein that is related to G1073, although it is most closely related to the Arabidopsis proteins G1075 and G1076. The aim of this project was to determine whether overexpression of G3460 in Arabidopsis produces comparable effects to those of G1073 overexpression.

[1747] Morphological Observations. Overexpression of G3460 in Arabidopsis produced striking morphological effects that included changes in leaf shape, altered flower morphology, and dramatic increases in vegetative biomass.

[1748] Phenotypes obtained in the three sets of 35S::G3460 lines isolated are detailed below.

[1749] Lines 301-312: 6/12 plants (#301, 306, 307, 308, 309, 312) were small (particularly at early stages), and had rather dark green leaves that were curled and in some cases serrated. These lines were markedly late flowering and exhibited a variety of non-specific floral abnormalities. Line 304 lacked these phenotypes, but exhibited enlarged leaves. The remaining lines showed some size variation, but otherwise, no consistent differences to wild type.

[1750] Lines 321-326: 3/6 plants (#321, 325, 326) had markedly broad leaves. #322, 324, 325 were late flowering and displayed dark green curled rosettes and floral abnormalities at late stages. #323 was small with curled contorted leaves.

[1751] Lines 341-358: considerable size variation was apparent at early stages. Later, 12/18 plants (#341, 344, 345, 346, 347, 352, 354, 355, 356, 357, 358, 359) were small (10-90% wild type size), late flowering and showed broad but severely twisted leaves and floral abnormalities. 5/18 lines (#342, 349, 350, 351, 353) lacked the severe leaf curling, but produced extremely enlarged leaves and were only mildly late flowering compared to wild type. A single line #348 was slightly early flowering.

[1752] T2-321: all small at early stages, curled leaves, dark green, and later flowering at later stages.

[1753] T2-324; all were markedly small with curled leaves and poor fertility.

[1754] T2-326; all small at early stages, 4/6 had enlarged leaves later on. 1/6 were tiny, 1/6 appeared wild type.

[1755] T2-307; all small, with curled leaves.

[1756] T2-308; all slightly small, with curled yellow leaves.

[1757] T2-309; all small, with curled yellowed leaves.

[1758] T2-343; 3/6 slightly early flowering, 3/6 appeared wild type.

[1759] T2-351; all small at early stages with curled leaves. Some evidence of early flowering was seen in this line. At later stages, leaves became wide and rounded.

[1760] T2-353; all small with extremely curled leaves at early stages. At later stages, leaves became broader and larger than in controls.

[1761] The above results indicate that G3460 produces complex effects on morphology that are likely to be influenced by subtle changes in transgene expression level. Additionally, parental phenotypes were not always maintained between generations. For example, both lines 351 and 353 had an initial primary transformant that was large and did not show severe leaf curling. However, severe leaf curling was apparent in the T2 progeny from those lines.

[1762] Physiology (Plate assays) Results. Four of ten 35S::G3460 seedlings were more tolerant to heat during a germination assay. Occasional lines also showed positive results in some of the other plate assays. Some of the 35S::G3460 seedlings were also small, pale and poorly developed when grown on control plates in the absence of a stress treatment.

[1763] Physiology (Soil Drought-Clay Pot) Summary. 35S::G3460 lines outperformed wild-type controls when tested in soil drought assays. Two of three independent lines showed significantly better survival than controls in two different plantings.

TABLE 77
35S::G3460 drought assay results:

| | | Mean | Mean | p-value for | Mean | Mean | p-value for |
|---|---|---|---|---|---|---|---|
| | Project | drought | drought | drought score | survival for | survival for | difference in |
| Line | Type | score line | score control | difference | line | control | survival |
| 343 | DPF | 0.40 | 0.60 | 0.58 | 0.050 | 0.093 | 0.17 |
| 343 | DPF | 0.70 | 0.80 | 0.84 | 0.10 | 0.13 | 0.45 |
| 353 | DPF | 2.2 | 0.70 | 0.0060* | 0.31 | 0.12 | 0.00023* |
| 353 | DPF | 2.5 | 0.30 | 0.00031* | 0.43 | 0.029 | 0.0000000077* |

DPF = direct promoter fusion project
Survival = proportion of plants in each pot that survived
Drought scale: 6 (highest score) = no stress symptoms, 0 (lowest score; most severe effect) = extreme stress symptoms
*line performed better than control (significant at P < 0.11)

[1764] Discussion. 35S::G3460 lines showed positive results when tested in plate based stress assays (heat tolerance on germination) and in the soil drought assay.

[1765] However, the majority of 35S::G3460 lines displayed a variety of morphological abnormalities including reduced size, slow growth, very delayed flowering, severely curled leaves and floral defects. Nonetheless, nine out of a total of thirty six T1 lines showed a somewhat different phenotype; these plants were slightly late flowering but developed extremely enlarged leaves, particularly at later stages of development. This resulted in a very substantial increase in vegetative biomass (possibly greater than that seen in 35S::G1073 Arabidopsis lines).

[1766] Interestingly, some T1 lines with enhanced vegetative biomass yielded small T2 progeny with extremely curled leaves. The basis of this change is unknown at present.

[1767] It is interesting to note that some aspects of the above phenotype, such as the enlarged leaves, were similar to those seen in 35S::G1073 lines. However, other features such as the extremely twisted dark green curled leaves seen in the majority of 35S::G3460 lines were not seen in 35S::G1073 transformants.

[1768] Potential applications. G3460 can provide enhanced drought tolerance in Arabidopsis, and thus could be used to regulate drought tolerance in crops. However, like G1073, G3460 produced undesirable morphological effects in Arabidopsis. It is not clear how these effects, which are somewhat different from those observed with G1073, might translate to soybean. However, particular with expression optimization, G3460 is an excellent candidate for the enhancement of yield and biomass accumulation.

G3408 (SEQ ID NO:145 and 146; Oryza sativa)—Constitutive 35S

[1769] Background. G3408 is more distantly related to G1073 than many of the other crop homologs in our study. The aim of this project was to determine whether overexpression of G3408 in Arabidopsis produces comparable effects to those of G1073 overexpression.

[1770] Morphological Observations. Overexpression of G3408 produced a number of alterations in Arabidopsis growth and development including changes in size, leaf shape, growth rate and flowering time. Interestingly, a number of T2 lines showed similar morphology to that seen in 35S::G1073 plants.

[1771] Physiology (Soil Drought-Clay Pot) Summary. 35S::G3408 lines were observed to be more tolerant to drought than control lines.

TABLE 78
35S::G3408 drought assay results.

| | | Mean | Mean | p-value for | Mean | Mean | p-value for |
|---|---|---|---|---|---|---|---|
| | Project | drought | drought score | drought score | survival for | survival for | difference in |
| Line | Type | score line | control | difference | line | control | survival |
| 331_MIX | DPF | 0.20 | 0.20 | 1.0 | 0.021 | 0.021 | 1.0 |
| 331_MIX | DPF | 1.9 | 1.3 | 0.059* | 0.34 | 0.26 | 0.12 |
| 331_MIX | DPF | 1.2 | 1.6 | 0.16 | 0.26 | 0.30 | 0.42 |
| 327 | DPF | 1.0 | 0.42 | 0.011* | 0.27 | 0.24 | 0.79 |
| 331 | DPF | 0.25 | 0.083 | 0.072* | 0.17 | 0.13 | 0.21 |
| 336 | DPF | 0.67 | 0.25 | 0.048* | 0.21 | 0.24 | 0.45 |

DPF = direct promoter fusion project
TCST = Two component super transformation project
Survival = proportion of plants in each pot that survived
Drought scale: 6 (highest score) = no stress symptoms, 0 (lowest score; most severe effect) = extreme stress symptoms
*line performed better than control (significant at P < 0.11)

[1772] Discussion. 35S::G3408 lines exhibited a variety of morphological changes including reduced size, alterations in leaf shape, slow growth, and delayed flowering. Occasional lines showed broad, enlarged leaves. Such effects were comparable to those seen in some of the overexpression lines for the related Arabidopsis genes G2153 and G2156, suggesting that G3408 has a somewhat comparable activity to those proteins. While 35S::G3408 lines did not exhibit any consistently improved performance in either plate-based abiotic stress assays, they did perform better in our soil-based drought assays. It should be noted that the primary transformants were all dwarfed, although the T2 progeny used in physiology assays had relatively wild-type morphology. Thus, it is possible that G3408 was relatively poorly expressed in the lines subjected to abiotic stress assays.

[1773] Potential applications. Based on the results obtained so far, G3408 might be applied to modify developmental characters such as leaf morphology and flowering time, and improve drought tolerance.

[1774] Background. G1274 from Arabidopsis is a member of the WRKY family of transcription factors and is of interest based on soil drought tolerance exhibited by 35S::G1274 Arabidopsis lines. G1274 corresponds to AtWRKY51 (At5g64810).

[1775] Morphological Observations.

[1776] Direct promoter fusion lines: Twenty 35S::G1274 direct promoter-fusion lines have been isolated (Lines 301-320). Lines 301, 302, 304, 307, 308, 309, 311 and 313-320 had broad, rounded, somewhat flat leaves that were oriented upwards. The leaves of the other lines were wild type. Lines 302, 311 and 315 had a more extreme phenotype and exhibited a short stature with slightly bushy architecture. Late in development, most lines showed no differences from controls, although lines 302, 311 and 315 had bushier inflorescences and increased silique number. At a low frequency, especially noted in line 302, trilocular siliques with increased seed number were noted.

[1777] Two-component lines: Twenty-eight 35S::G1274 two component lines have been isolated (lines 321-328, 381-392 and 401-408. More extreme phenotypes were observed in these lines, compared to the direct promoter-fusion lines. Lines were typically late developing and were reduced in size to varying degrees. Leaves were dark green and plants typically had compact rosettes and bushy inflorescences. Five T1 plants died before maturation, and fertility was reduced in plants that did reach maturity.

[1778] Physiology (Plate assays) Results. Several 35S::G1274 lines (two-component and direct promoter fusions) from multiple generations were analyzed in plate-based abiotic stress assays. Direct promoter fusion lines (lines 1 and 4, T3 lines generated during our genomics program) showed sucrose insensitivity in a germination assay and tolerance to chilling growth conditions (lines 1, 4, 8, 12, 16). These lines also performed better than controls in a C/N sensing and a low N growth assay. However, no significant difference compared to wild-type seedlings was seen when a new set of T2 direct promoter fusion lines (302-314) were analyzed.

[1779] For the two-component lines that were examined, several were found to be insensitive to ABA in a germination assay and tolerant to chilling growth and severe dehydration. However, for unknown reasons, these lines did not show positive results in N related assays.

[1780] Several lines of both promoter types had less root growth, were chlorotic and small.

[1781] Physiology (Soil Drought-Clay Pot) Summary. 35S::G1274 lines showed excellent drought tolerance with both direct-fusion and two component lines across multiple lines and plant dates.

TABLE 79
35S::G1274 drought assay results:

| | | | | Mean | | | Mean | |
|---|---|---|---|---|---|---|---|---|
| | | | Mean | drought | p-value for | Mean | survival | |
| | | Project | drought | score | drought score | survival | for | p-value for difference in |
| PID | Line | Type | score line | control | difference | for line | control | survival |
| P8239 | 392 | TCST | 3.0 | 1.3 | 0.023* | 0.71 | 0.21 | 0.0000000000000024* |
| P8239 | 402 | TCST | 2.5 | 1.1 | 0.0047* | 0.36 | 0.24 | 0.027* |
| P8239 | 403 | TCST | 2.1 | 0.90 | 0.0022* | 0.50 | 0.17 | 0.000000020* |

[1782] Discussion. Plants containing direct fusion and two-component 35S::G1274 constructs showed excellent drought tolerance in our clay pot soil drought screens. Such results have been obtained in multiple lines across several plant dates. 35S::G1274 lines were also analyzed in plate-based abiotic stress assays. Direct promoter fusion lines showed sucrose insensitivity in a germination assay and tolerance to chilling growth conditions. Additionally, some of these lines showed a better performance than controls in a low N growth and C/N sensing assay on plates. However, in a new set of T2 direct promoter fusion lines, no significant difference compared to wild-type seedlings was observed. Several two-component lines were also examined. Several of these lines were found to be insensitive to ABA in a germination assay and tolerant to chilling growth and severe dehydration. The difference observed between direct fusion and two-component lines may have been due to expression level obtained in the various lines.

[1783] 35S::G1274 plants consistently displayed a short, bushy architecture. This phenotype was stronger in two-component lines, where it was often accompanied by a delay in development. Leaves of 35S::G1274 plants were more rounded, flat and oriented upwards compared to wild-type. Additionally, at low frequency, some lines exhibited an overall increase in silique number, as well as a trilocular (and sometimes wrinkled) silique phenotype. These siliques contained an additional chamber of seeds, which sometimes resulted in twice as many seeds being produced, compared to wild-type controls. This silique effect was also observed in several of the G1274 crop homologs. However, some two-component lines showed an overall reduction in fertility.

[1784] Potential applications. Based upon soil drought, ABA, and sucrose plate assay results, G1274 appears to be an excellent candidate for improvement of drought/osmotic stress tolerance in crop species. G1274 also appears useful in protecting plants against low temperature, as well in low nitrogen environments. Additionally, G1274 may be optimized for use in increasing yield, or altering fruit architecture. However, some of the morphological effects associated with overexpression suggest that tissue-specific or conditional promoters might be required to enhance the utility of this and related genes.

G1274 (SEQ ID NO: 185 and 186; Arabidopsis thialiana)—Super Activation (C-GAL4-TA)

[1785] Background. The aim of this project was to determine whether the efficacy of the G1274 protein could be improved by addition of an artificial GAL4 activation domain at the C-terminus.

[1786] Morphological Observations. 35S::G1274-GA-4 lines showed somewhat comparable morphological effects to 35S::G1274 lines. The majority of plants showed an increase in leaf size. A number of lines also exhibited a loss of apical dominance during the reproductive phase. This latter phenotype was possibly less penetrant, though, than with 35S::G1274 lines.

[1787] Line Details: the following showed short, broad, flat leaves versus the control: #781, 784, 785, 787, 789-791, 795, 796, 799. #784, 787, 791, 799 exhibited a bushy phenotype.

[1788] Discussion. Several lines were examined morphologically, and showed somewhat comparable morphological effects to 35S::G1274. The majority of plants showed broad and flat leaves, leading to an overall increase in leaf size. A number of lines also exhibited a loss of apical dominance during the reproductive phase. This latter phenotype was possibly less penetrant than that seen with constitutive G1274 lines. A distinct effect on silique morphology was not noted in the lines thus far examined, as was seen in some 35S::G1274 plants.

[1789] It is notable that these 35S::G1274-GAL4 plants affect overall leaf morphology and inflorescence structure similarly to G1274. Thus, the GAL4 might also serve as a useful tag for use in immunoprecipitation experiments. At this time, it is unknown if fusion of the GAL4 activation domain will enhance stress tolerance.

G1274 (SEQ ID NO: 185 and 186; Arabidopsis thaliana)—Point Mutation

[1790] Background. G1274 from Arabidopsis is a member of the WRKY family of transcription factors and is of interest based on the soil drought tolerance exhibited by 35S::G1274 Arabidopsis lines. G1274 corresponds to AtWRKY51 (At5g64810).

[1791] The aim of this project was to examine the role of particular residues within the G1274 protein. The following clones have been engineered via site-directed mutagenesis:

[1792] (1) 35S::G1274 (K120Q)

[1793] (2) 35S::G1274 (N131S)

[1794] (3) 35S::G1274 (D149S)

[1795] (4) 35S::G1274 (Y155V)

[1796] (5) 35S::G1274 (S136T)

[1797] The K120Q mutation targets an amino acid within the highly conserved WRKY box of the G1274 DNA binding domain. The sequence of the WRKY box is highly conserved among all WRKY-family proteins, and it is notable that the three Arabidopsis proteins included in the G1274 study group (G1274, G1275 and G1758) have an amino acid variation within this box that distinguishes them from all other WRKY proteins. This K120Q mutation converts the WRKY box of these three proteins to a sequence similar to that found in all other WRKY proteins (which contain a Q residue at this position). Mutations 2-5 above each target strongly conserved amino acids within the DNA binding domain, but outside of the WRKY box. These residues, in effect, define the G1274 study group as distinct from the other WRKY II-c family members.

[1798] Morphological Observations. Overexpression lines for each of five different mutagenized variants of G1274 have now been generated. Interestingly these lines differentiated between the broad leaf and bushy inflorescence phenotypes that are characteristic of G1274 overexpression.

[1799] The first of the variants (K120Q) produced a much more extreme bushy phenotype than wild-type. Variants 2-4 ((N131S); (D149S); (Y155V)) each yielded increased leaf size with no effect or only a very mild effect on apical dominance. Variant 5 (S136T) produced equivalent effects to the wild-type form of the G1274 protein.

[1800] (1) Line 801-820(contains 35S::G1274(K120Q)): all were small at early stages, with upward pointing leaves, and a slightly pale coloration. During the reproductive phase, these lines showed a more extreme loss of apical dominance than overexpression lines for the wild-type G1274 clone. No changes in leaf size were apparent in these lines. Lines 801, 803, 804, 806, 808, 810-813, 815, 817 and 818 showed the strongest effects. #814 and #816 were slightly small and early developing versus wild-type. Lines 802, 807, 809, 817 were wild-type.

[1801] (2) Lines 821-840 (contains 35S::G1274(N131S)): all lines (except 839 and 840 which appeared wild type) showed broad leaves. A number of lines exhibited a slight loss of apical dominance during the reproductive phase.

[1802] (3) Lines 861-880 (contains 35S::G1274(D149S)): almost all showed broad flat leaves; two lines appeared wild type.

[1803] (4) Lines 881-900 (contains 35S::G1274(Y155V)): most showed broad flat leaves, a few lines were tiny. Several lines were slow developing.

[1804] (5) Lines 841-860 (contains 35S::G1274(S136T)): all showed broad flat leaves and a number showed a bushy phenotype. These effects were comparable to those seen on overexpression of the wild-type form of G1274.

[1805] Physiology (Plate assays) Results. Many of the lines harboring mutagenized variants of G1274 were more tolerant, relative to controls, in plate-based stress assays.

[1806] Lines 801-820 overexpressing site-directed mutation (1), were more tolerant to germination in cold conditions (10 of 10 lines tested) and growth in cold conditions (5 of 10 lines tested) than wild-type controls. Lines 801-820 also had altered C/N sensing, with 7 of 10 lines tested having increased tolerance to germination in low nitrogen conditions, and 10 of 10 lines having less anthocyanin on basal media minus nitrogen plus 3% sucrose and 1 mM glutamine.

[1807] Lines 821-840, overexpressing site-directed mutation (2), were more tolerant to germination in cold conditions (6 of 10 lines tested) and growth in cold conditions (5 of 10 lines tested) than wild-type controls. Lines 821-840 also had altered C/N sensing, with 5 of 10 lines having less anthocyanin on basal media minus nitrogen plus 3% sucrose and 1 mM glutamine.

[1808] Lines 861-880, overexpressing site-directed mutation (3), were more tolerant to germination in cold conditions (5 of 10 lines tested). Lines 861-880 also had altered C/N sensing, with 7 of 10 lines having less anthocyanin on basal media minus nitrogen plus 3% sucrose and 1 mM glutamine.

[1809] Lines 881-900, overexpressing site-directed mutation (4), were more tolerant to sucrose (5 of 10 lines tested), germination in cold conditions (3 of 10 lines tested), growth in cold conditions (3 of 10 lines tested), and less sensitive to ABA (6 of 10 lines tested), than wild-type controls. Under low N conditions, 3 of 10 lines exhibited better root growth than wild-type control plants.

[1810] Four of ten lines 841-850 overexpressing site-directed mutation (5) were more tolerant to desiccation than control plants in plate-based assays.

[1811] Physiology (Soil Drought-Clay Pot) Summary. Lines harboring mutagenized variants of G1274 generally showed strongly enhanced survival relative to wild-type in soil drought assays. For each of the first for variants, at least one line showed a better rate of survival and/or recovery from drought treatment than wild-type controls.

TABLE 80
G1274 point mutation drought assay results:

| | | Mean | Mean | | | | |
|---|---|---|---|---|---|---|---|
| | | drought | drought | p-value for | Mean | Mean | p-value for |
| | | score | score | drought score | survival for | survival for | difference in |
| Line | Project Type | line | control | difference | line | control | survival |
| 809 | Site Dir Mut 1 | 3.9 | 2.9 | 0.055* | 0.88 | 0.57 | 0.0000014* |
| 809 | Site Dir Mut 1 | 1.7 | 1.3 | 0.26 | 0.43 | 0.26 | 0.0023 |
| 824 | Site Dir Mut 2 | 1.9 | 2 | 1 | 0.37 | 0.41 | 0.49 |
| 824 | Site Dir Mut 2 | 1.6 | 1 | 0.085* | 0.36 | 0.21 | 0.0069* |
| 862 | Site Dir Mut 3 | 1.9 | 0.88 | 0.03* | 0.3 | 0.25 | 0.37 |
| 862 | Site Dir Mut 3 | 1.6 | 0.9 | 0.015* | 0.34 | 0.16 | 0.0011* |
| 865 | Site Dir Mut 3 | 1.8 | 0.75 | 0.033* | 0.32 | 0.21 | 0.05* |
| 865 | Site Dir Mut 3 | 1.5 | 1.6 | 0.87 | 0.29 | 0.31 | 0.69 |
| 866 | Site Dir Mut 3 | 0.88 | 0.25 | 0.017* | 0.25 | 0.098 | 0.0037* |
| 866 | Site Dir Mut 3 | 2.2 | 1.4 | 0.026* | 0.39 | 0.39 | 0.90 |
| 885 | Site Dir Mut 4 | 3.1 | 1.4 | 0.0018* | 0.82 | 0.38 | 0.00000000000065* |
| 885 | Site Dir Mut 4 | 1.7 | 1.2 | 0.14 | 0.40 | 0.35 | 0.39 |

Site Dir Mut (no.) = Site directed mutation project no.
Survival = proportion of plants in each pot that survived
Drought scale: 6 (highest score) = no stress symptoms, 0 (lowest score; most severe effect) = extreme stress symptoms
*line performed better than control (significant at P < 0.11)

[1812] Discussion. The point mutants made for this project have separated the broad leaf and bushy inflorescence phenotypes that are characteristic of G1274 overexpression. The K120Q variant exacerbated the bushy phenotype, with the plants showing an extreme loss of apical dominance. The N131S, D149S and Y155V variants, on the other hand, each yielded increased leaf size with no effect or only a very mild effect on apical dominance. The final variant, S136T, produced equivalent effects to the wild-type form of the G1274 protein.

[1813] Arabidopsis lines ectopically expressing site directed mutation projects 1, 2, 3 and 4 each showed significant drought tolerance in one or more plantings relative to controls.

[1814] Potential applications. The variants tested here indicate a means of using G1274 to release apical dominance without affecting leaf size and vice versa. Various mutations shed light on the role played by specific residues in conferring abiotic stress tolerance in the G1274 polypeptide, and may be used to confer drought tolerance.

G1275 (SEQ ID NO: 207 and 208; Arabidopsis thaliana)—Constitutive 35S

[1815] Background. G1275 from Arabidopsis is a member of the WRKY family of transcription factors and is of interest based on its high similarity to G1274, which exhibited soil drought tolerance when overexpressed. G1275 corresponds to AtWRKY50 (At5g26170). In our earlier genomics program, G1275 overexpression was noted to cause marked dwarfing and loss of apical dominance. No indication of stress tolerance was observed in the assays run at that time (in contrast to G1274, which did show some chilling and low nitrogen tolerance). The aim of this project was to determine whether expression of G1275 from the 35S promoter was sufficient to confer stress tolerance that is similar to, or better than, that seen in 35S::G1274 lines.

[1816] Morphological Observations. G1275 induced severe dwarfing, and significant lethality when overexpressed. Approximately half of the T1 seedlings isolated died or were infertile. The degree of dwarfing in 35S::G1275 was variable; however, all T1 plants were reduced in size compared to controls. Inflorescences were typically compact and bushy, and lines were also late-flowering to various degrees. Line 365 exhibited floral abnormalities and line 364 had wrinkled siliques. A total of 31 lines were isolated from three batches of T1 plants: Lines 301-303, 361-374 and 521-536. Due to the morphological abnormalities, only very limited quantities of seeds were available for stress assays.

[1817] Physiology (Plate assays) Results. Four out of eight 35S::G1275 lines were larger and greener than control seedlings in a heat germination assay. Four lines were also more tolerant than wild-type seedlings to cold conditions in a chilling growth assay.

[1818] Discussion. Several direct fusion lines have been examined in plate-based assays. These lines were noted to be tolerant of both heat and cold stress. Morphologically. 35S::G1275 plants consistently displayed a short, bushy architecture. This phenotype was similar to that seen in 35S::G1274 plants, but stronger here and included some severe dwarfing and lethality. Also similar to what was seen when G1274 was overexpressed, 35S::G1275 plants also showed a wrinkled silique phenotype (although siliques containing extra locules and/or seeds have not been noted in the lines examined). Some plants had rounded and flat leaves, similar to that seen with G1274 overexpression.

[1819] Potential applications. 35S::G1275 plants have yet to be tested in drought assays. However, based on the plate assay data, G1275 could be used to create temperature stress-tolerant plants. G1275 appears to similarly affect overall morphology and plant architecture as did G1274, but some of the potentially negative effects are more pronounced with G1275. Therefore, this gene may need to be optimized using tissue-specific or conditional promoters to enhance utility. The gene might also be applied to regulate morphological traits such as flowering time, branching patterns, and fruit development.

G1275 (SEQ ID NO: 207 and 208; Arabidopsis thaliana)—Stress Inducible RD29A—line 5

[1820] Background. The aim of this project was to determine whether expression of G1275 from an RD29A stress inducible promoter, was sufficient to confer stress tolerance without the deleterious morphological off-types (loss of apical dominance, dwarfing etc.) that are associated with G1275 constitutive expression

[1821] Morphological Observations. A total of thirty-two RD29A_line5::G1275 lines were isolated from four separate batches of T1 plants (441-447, 461-463, 481-491 and 501-511). In general plants were slightly smaller than controls. Four plants died early in development. Lines 461, 463 and 483 were late flowering, and line 505 had siliques that were broader than control siliques. At 31 days, lines 501 and 507 had long rectangular rosette leaves.

[1822] Physiology (Plate assays) Results. Three out of ten RD29A::G1275 lines were insensitive to ABA in a germination assay.

[1823] Physiology (Soil Drought-Clay Pot) Summary. RD29A::G1275 lines showed strongly enhanced survival relative to wild-type in soil drought assays. Two lines showed a better rate of survival than wild-type controls and one line exhibited significantly better survival than wild-type on one plant date.

TABLE 81
RD29A::G1275 drought assay results:

| | | Mean | Mean | p-value for | Mean | Mean | p-value for |
|---|---|---|---|---|---|---|---|
| | Project | drought | drought | drought score | survival for | survival for | difference in |
| Line | Type | score line | score control | difference | line | control | survival |
| 444 | TCST | 4.4 | 3.6 | 0.039* | 0.87 | 0.71 | 0.0017* |
| 444 | TCST | 1.5 | 1.5 | 0.86 | 0.26 | 0.35 | 0.12 |
| 463 | TCST | 2.4 | 2.8 | 0.28 | 0.47 | 0.52 | 0.40 |
| 463 | TCST | 2.0 | 1.2 | 0.0075* | 0.28 | 0.24 | 0.41 |

TCST = Two component super transformation project
Survival = proportion of plants in each pot that survived
Drought scale: 6 (highest score) = no stress symptoms, 0 (lowest score; most severe effect) = extreme stress symptoms
*line performed better than control (significant at P < 0.11)

[1824] Discussion. RD29A::G1275 lines have been obtained using a two-component system. In plate-based stress assays, 30% of lines tested were insensitive to ABA. Two lines showed evidence of greater tolerance to drought than controls. Morphologically, a few lines showed sporadic differences in leaf or silique shape, but overall, the plants did not show consistent differences from controls, other than a slight reduction in overall size.

[1825] Potential applications. Based on the results from plate assays, G1275 may be used along with an inducible promoter to confer tolerance to abiotic stresses such as drought.

G194 (SEQ ID NO: 217 and 218; Arabidopsis thaliana)—Constitutive 35S

[1826] Background. G194 (AtWRKY23, At2g47260) lies just outside of the phylogenetically defined G1274 study group. This gene was included in the present study to test the functional boundary of the G1274 study group, and determine the range of effects caused by genes that are more distantly-related to G1274. G194 is very closely related to G2517, which produced similar stress tolerance effects as G194 when overexpressed.

[1827] Morphological Observations. G194 produced severe dwarfing when overexpressed. The most severely affected individuals died at early stages. T1 plants were also typically late flowering, and approximately one third of the T1 plants died during the course of analysis. Lines overexpressing G194 were also typically delayed developmentally, and floral abnormalities were common on lines that produced flowers.

[1828] A total of twenty T1 lines were obtained: 301-311 and 321-329. Lines 308, 309, 322, 323, 325 and 328 were tiny (<5% of control). Line 325 was also slightly dark green and had a compact rosette. Line 321, 324, 326, 327, 329 and 330 were small (<50% of control size).

[1829] Physiology (Plate assays) Results. Four out of four 35S:G194 lines performed better than wild-type seedlings in a severe dehydration assay.

[1830] Discussion. 40% of the 35S::G194 lines tested in a plate-based severe dehydration assay were more tolerant than controls. The closely related gene, G2517, behaved similarly in this same assay. The most consistent morphological effect from G194 overexpression was severe dwarfing (5-50% of control size). Additionally, plants were late flowering, and many T1 plants died during the course of analysis. When plants survived to the reproductive stage, floral abnormalities were also common. These phenotypes are much more severe than those observed for G1274. The tolerance to severe dehydration indicates that more distant WRKY proteins such as G194, have some activity in common with G1274. Nonetheless, that these proteins did not yield the same morphologies as G1274 when overexpressed indicates that they are not of equivalent function.

[1831] Potential applications. Several G194 overexpression lines demonstrated enhanced survival in the plate-based dehydration assay, so it is possible that G194 may be useful in creating drought tolerant plants. However, the severe morphological effects associated with overexpression would require optimizing with tissue-specific or conditional promoters to enhance any possible utility.

G1758 (SEQ ID NO: 393 and 394; Arabidopsis thaliana)—Constitutive 35S

[1832] Background. G1758 corresponds to Arabidopsis AtWRKY59 (At2g21900). The aim of this project was to re-assess with a greater number of lines whether expression of G1758 from the 35S promoter was sufficient to confer stress tolerance that is similar to, or better than, that seen in 35S::G1274 lines.

[1833] Physiology (Plate assays) Results. In stress plate assays, 3 of 10 lines were more tolerant than wild-type seedlings in a chilling growth assay. Morphologically, 35S::G1758 lines were not consistently different from wild-type.

[1834] Discussion. The gene was included in this research program based on its high similarity to G1274, which exhibited soil drought tolerance when overexpressed. Interestingly, though, during our earlier genomics program, 35S::G1758 lines did not show the morphological effects seen in 35S::G1274 and 35S::G1275 lines, and showed a wild-type response in the limited number of stress assays performed at that time.

[1835] Potential applications. Based on our analysis of 35S::G1758 lines, this gene may be used in creating plants that are tolerant of abiotic stresses such as cold.

G2517 (SEQ ID NO: 219 and 220; Arabidopsis thaliana)—Constitutive 35S

[1836] Background. G2517 (AtWRKY68, At3g62340) lies just outside of the phylogenetically defined G1274 study group. This gene was included in the present study to test the functional boundary of the G1274 study group, and determine the range of effects caused by genes that are more distantly-related to G1274. G2517 is very closely related to G194, which produced similar stress tolerance effects as G2517 when overexpressed.

[1837] Morphological Observations. G2517 induced early flowering when overexpressed. Plants were typically small with spindly inflorescences. Most plants were also early flowering, although a late flowering phenotype was observed in two cases (lines 363 and 365). A total of 54 35S::G2517 lines were isolated from 4 separate plantings.

[1838] Physiology (Plate assays) Results. Six out of ten 35S::G2517 lines were more tolerant to a severe dehydration based plate assay.

[1839] Discussion. 60% of the 35S::G2517 lines tested in a plate-based severe dehydration assay were more tolerant than controls. The closely related G194 behaved similarly in this same assay. G2517 overexpression also induced early flowering and spindly architecture. Plants were typically small, and at a low frequency, were late flowering. These morphological effects are similar to those seen in G194, and in general, are more severe than observed for G1274, G1274. The tolerance to severe dehydration indicates that more distant WRKY proteins such as G2517, have some activity in common with G1274. Nonetheless, that these proteins did not yield the same morphologies as G1274 when overexpressed indicates that they are not of equivalent function.

[1840] Potential applications. Several G2517 overexpression lines demonstrated enhanced survival in the plate-based dehydration assay, so G2517 may be used to create drought-tolerant plants. The morphological effects associated with overexpression may require optimizing with tissue-specific or conditional promoters. The gene might also be used to modify developmental traits such as flowering time.

G3719 (SEQ ID NO: 211 and 212; Zea mays)—Constitutive 35S

[1841] Background. G3719 is a WRKY gene from Zea mays and is a closely-related homolog of G1274. Based on our phylogenetic analysis, there are two separate clades representing potential monocot homologs of G1274, and this gene is most closely related to G3730 from rice. The aim of this study was to assess the role of G3719 in drought stress-related tolerance, and to compare the overexpression effects with those of other G1274-related genes.

[1842] Morphological Observations. G3719 induced severe dwarfing, a short bushy phenotype, significant lethality and various developmental alterations when overexpressed in Arabidopsis. 35S::G3719 seedlings were observed to be smaller than control seedlings. The majority of the plants died prior to maturation, and the plants surviving to adulthood typically had low fertility. A total of thirty-three 35S::G3719 lines have been selected from four separate planting dates (lines 301-306, 321-333, 361-368 and 381-386), but the seed yield from these plants was extremely poor.

[1843] Discussion. Morphological observations indicate that overexpression of this gene causes severe dwarfing, significant lethality and various developmental alterations such as a loss of apical dominance and low fertility. These effects are stronger than those seen in 35S::G1274 lines, and very similar to those observed for G1275 lines. This may indicate that the monocot subclade to which G3719 belongs may better represent G1275, rather than G1274.

[1844] 35S::G3719 lines have not yet been tested in drought-related assays.

[1845] Potential applications. Alterations of apical dominance or plant architecture could create new plant varieties. Dwarf plants may be of potential interest to the ornamental horticulture industry, and shorter, more bushy plants may also have increased resistance to lodging.

G3720 (SEQ ID NO: 203 and 204; Zea mays)—Constitutive 35S

[1846] Background. G3720 is a WRKY gene from Zea mays and is a closely-related homolog of G1274. Based on our phylogenetic analysis, there are two separate clades representing potential monocot homologs of G1274, and this gene is most closely related to G3725 and G3726 from rice, and G3722 from corn. The aim of this study was to assess the role of G3720 in drought stress-related tolerance, and to compare the overexpression effects with those of other G1274-related genes.

[1847] Morphological Observations. G3720 induced severe dwarfing, loss of apical dominance and significant lethality and various developmental alterations when overexpressed in Arabidopsis. 35S::G3720 seedlings were observed to be smaller than control seedlings. The majority of the plants died prior to maturation, and the plants surviving to adulthood typically had low fertility. A total of thirty-seven 35S::G3720 lines have been selected from four separate planting dates (Lines 301-304, 321-333, 341-350 and 361-380), but these lines yielded few if any seeds.

[1848] Physiology Results. Three of ten lines tested showed more root growth under low nitrogen conditions than wild-type control plants.

[1849] Discussion. Morphologically, 35S::G3720 lines showed similar, but more severe phenotypes than the other G1274-related genes. These included significant mortality, dwarfing, extreme loss of apical dominance, as well as changes in flowering time and leaf shape. Additionally, these lines had decreased fertility. These severe phenotypes are also observed in overexpression lines of G3726 from rice, which is the most similar gene to G3720 in the study group. The 35S::G3720 effects were more similar to those of G1275 overexpression than G1274 overexpression.

[1850] Potential applications. The plate based results indicate that 35S::G3720 overexpression may be used to confer stress tolerance in plants, particularly to low nitrogen conditions. Alterations of apical dominance or plant architecture could create new plant varieties. Dwarf plants may be of potential interest to the ornamental horticulture industry, and shorter, more bushy plants may also have increased resistance to lodging.

G3721 (SEQ ID NO: 197 and 198; Oryza sativa)—Constitutive 35S

[1851] Background. G3721 is a WRKY gene from Oryza sativa and is a closely-related homolog of G1274. Based on our phylogenetic analysis, there are two separate clades representing potential monocot homologs of G1274, and this gene is most closely related to G3727, G3804, and G3728 from corn. The aim of this study was to assess the role of G3721 in drought stress-related tolerance, and to compare the overexpression effects with those of other G1274-related genes.

[1852] Morphological Observations. A total of twenty 35S::G3721 lines have been isolated: 301-320. Plants overexpressing G3721 were all initially small on selection plate, compared to controls. Seven days after germination they were also pale, vitrified and had very short roots. Six of twenty lines died shortly after transplantation and an additional seven lines were severely dwarfed. The severely dwarfed lines were typically spindly, bushy, and late-developing. They also had abnormal siliques. Line 313 was bushy and had terminal flowers emerging from the leaf axils. Lines 303 and 320 were wild-type sized and flowered earlier than controls.

[1853] Physiology (Plate assays) Summary. Seven of ten 35S::G3721 lines tested were more tolerant to salt, 5 of 10 lines were more tolerant to mannitol, 10 of 10 lines were less sensitive to ABA, and 10 of 10 lines were more tolerant to cold in a germination assay, than wild-type controls.

[1854] Discussion. Morphological observations indicate that overexpression of this gene causes dwarfing, loss of apical dominance, changes in flowering time and lethality. These effects are stronger than those seen in 35S::G1274 lines, and similar to those observed in overexpression lines for G1275, as well as the related rice gene G3730. At a low frequency, 35S::G3721 lines also showed an abnormal silique phenotype, similar to G1274 and other homolog lines.

[1855] Potential applications. The plate based results indicate that 35S::G3721 overexpression may be used to confer stress tolerance in plants, particularly to salt, cold, and hyperosmotic stresses, likely including drought. Alterations of apical dominance or plant architecture could create new plant varieties. Dwarf plants may be of potential interest to the ornamental horticulture industry, and shorter, more bushy plants may also have increased resistance to lodging.

G3722 (SEQ ID NO: 199 and 200; Zea mays)—Constitutive 35S

[1856] Background. G3722 is a WRKY gene from Zea mays and is a closely-related homolog of G1274. Based on our phylogenetic analysis, there are two separate clades representing potential monocot homologs of G1274, and this gene is most closely related to G3725 and G3726 from rice, and G3720 from corn. The aim of this study was to assess the role of G3722 in drought stress-related tolerance, and to compare the overexpression effects with those of other G1274-related genes.

[1857] Morphological Observations. A total of twenty 35S::G3722 T1 lines were analyzed (301-320). Three lines died early in development, and all additional lines were small, pale and curly-leafed in the vegetative phase. The size of the remaining 17 lines varied, but all were typically small and bushy compared to controls. Lines 302-304, 306 and 310-314 were early developing and spindly compared to wild-type (with lines 311 and 312 earliest). Lines 310 and 313 had abnormal siliques.

[1858] Physiology Results. Four of 10 35S::G3722 lines had a higher rate of germination in a low nitrogen germination assay (under low nitrogen and high sucrose conditions) than control plants, and 6 of 10 35S::G3722 lines demonstrated altered C/N sensing in a low nitrogen germination assay with glutamine as a nitrogen source.

[1859] Discussion. Morphologically, these lines showed similar phenotypes to the other G1274-related genes including lethality, dwarfing, loss of apical dominance, as well as changes in flowering time and leaf shape. At a low frequency, these lines also produced abnormal siliques.

[1860] Potential applications. The plate based results indicate that 35S::G3722 overexpression may be used to confer stress tolerance in plants, particularly to low nitrogen conditions. Alterations of apical dominance or plant architecture could create new plant varieties. Dwarf plants may be of potential interest to the ornamental horticulture industry, and shorter, more bushy plants may also have increased resistance to lodging.

G3724 (SEQ ID NO: 187 and 188; Glycine max)—Constitutive 35S

[1861] Background. G3724 is a WRKY gene from Glycine max and is a closely-related homolog of G1274. Based on our phylogenetic analysis, this gene is most closely related to G3723 and G3803, also from soy. The aim of this study was to assess the role of this gene in drought stress-related tolerance, and to compare the effects with those of other G1274-related genes.

[1862] Morphological Observations. A total of seventeen 35S::G3724 lines were isolated and analyzed (Lines 301-317). At early stages, the majority of lines were small and a number of lines were slightly early flowering (#312, 314, 315). A number of lines developed enlarged rosettes by the later stages of development: #305, 308, 310, 311, 317. Lines 310, 311 and 317 were late flowering.

[1863] Physiology results. Five of 10 lines tested were more tolerant to salt, 3 of ten lines were more tolerant to sucrose, 10 of 10 lines were less sensitive to ABA, and 8 of 10 lines were less sensitive to cold in a germination assay than wild-type control plants.

[1864] Discussion. 35S::G3724 lines were consistently more tolerant to a number of abiotic stresses than controls. Morphological observations indicate that overexpression of this gene causes changes in flowering time, leaf shape and overall size. Many plants were small at early stages, but later some lines developed enlarged rosettes. Overall, there was not a strongly consistent phenotype. However, the large leaf phenotype was somewhat similar to that seen in 35S::G1274 lines.

[1865] Potential applications. However, based on the morphology results obtained so far, the gene may be used to modify developmental traits such as flowering time and leaf shape. This gene may also be used to increase biomass in plants, resulting in increased yield. Furthermore, the plate based results indicate that 35S::G3724 overexpression may be used to confer stress tolerance in plants, particularly to salt, cold during germination, and hyperosmotic stresses, including drought.

G3725 (SEQ ID NO: 213 and 214; Oryza sativa)—Constitutive 35S

[1866] Background. G3725 is a WRKY gene from Oryza sativa and is a closely-related homolog of G1274. Based on our phylogenetic analysis, there are two separate clades representing potential monocot homologs of G1274, and this gene is most closely related to G3720 and G3722 from corn, and G3726 from rice. The aim of this study was to assess the role of G3725 in drought stress-related tolerance, and to compare the overexpression effects with those of other G1274-related genes.

[1867] Morphological Observations. Fifteen 35S::G3725 lines have been isolated and analyzed (301-315). G3725 induced early flowering, reduced plant size slightly.

[1868] Physiology results. 35S::G3725 lines have more root growth compared with wild-type seedlings on control plates.

[1869] Discussion. In plate-based stress assays, G3725 overexpressing seedlings were noted to have more vigorous root growth on control plates, but behaved similarly to wild-type in all other assays. Morphologically, these lines showed mild phenotypes compared to the other G1274-related genes, and were similar to wild-type. Some lines, though, flowered slightly early and had slightly reduced size, but otherwise were similar to controls.

[1870] Potential applications. At this time, it is unknown how G3725 overexpression may affect drought tolerance. However, given the effects seen in roots in our plate based assays, the gene may be used to manipulate root development.

G3726 (SEQ ID NO: 201 and 202; Oryza sativa)—Constitutive 35S

[1871] Background. G3726 is a WRKY gene from Oryza sativa and is a closely-related homolog of G1274. Based on our phylogenetic analysis, there are two separate clades representing potential monocot homologs of G1274, and this gene is most closely related to G3720 and G3722 from corn, and G3725 from rice. The aim of this study was to assess the role of G3726 in drought stress-related tolerance, and to compare the overexpression effects with those of other G1274-related genes.

[1872] Morphological Observations. Thirty-seven 35S::G3726 lines were isolated. G3726 overexpression generally induced early flowering, short internode growth. Fifteen of thirty-seven lines isolated died prior to maturity. Plant size was typically reduced and plants were bushy compared to controls, although the degree of growth suppression and bushiness varied between lines. Siliques were also commonly smaller in the most severely affected 35S::G3726 lines.

[1873] Physiology (Plate assays) Results. Three 35S::G3726 lines contained less anthocyanins and were larger than control seedlings in a germination assay under cold conditions. One of these and two other lines performed better than controls in a cold growth assay.

[1874] Physiology (Soil Drought-Clay Pot) Summary. Two 35S::G3726 lines showed drought tolerance in our soil drought screens, including when CBF4 overexpressors (OEX), known to be more tolerant to drought than wild-type plants, were used as controls, as noted in the table below. Such results have been obtained with both direct-fusion and two component lines across multiple lines and plant dates.

TABLE 82
35S::G3726 drought assay results:

| | | | | | Mean | p-value for | | | |
|---|---|---|---|---|---|---|---|---|---|
| | | | | Mean | drought | drought | Mean | Mean | p-value for |
| | | | Project | drought | score | score | survival | survival for | difference in |
| PID | Line | Control | Type | score line | control | difference | for line | control | survival |
| P25211 | 309 | CBF4 | DPF | 1.3 | 0.8 | 0.22 | 0.14 | 0.14 | 0.86 |
| | | OEX | | | | | | | |
| P25211 | 309 | CBF4 | DPF | 1.8 | 0.9 | 0.014* | 0.27 | 0.13 | 0.0027* |
| | | OEX | | | | | | | |
| P25211 | 313 | CBF4 | DPF | 2.5 | 0.6 | 0.00024* | 0.27 | 0.086 | 0.00014* |
| | | OEX | | | | | | | |
| P25211 | 313 | CBF4 | DPF | 2.1 | 0.9 | 0.00057* | 0.24 | 0.17 | 0.22 |
| | | OEX | | | | | | | |

DPF = Direct promoter fusion
OEX = overexpressor
Survival = proportion of plants in each pot that survived
Drought scale: 6 (highest score) = no stress symptoms, 0 (lowest score; most severe effect) = extreme stress symptoms
*line performed better than control (significant at P < 0.11)

[1875] Discussion. Of the ten lines tested in plate assays, 30% were larger and had less anthocyanin than control seedlings in a cold germination assay. One of these lines, along with two other lines contained less anthocyanins in a cold growth assay. Significantly, two lines were more tolerant to drought than controls overexpressing CBF4, which are plants known to be more tolerant to drought than wild-type.

[1876] Morphologically, these lines showed similar, but more severe phenotypes than the other G1274-related genes. These included significant mortality, dwarfing, extreme loss of apical dominance, as well as changes in flowering time and leaf shape. Additionally, these lines had decreased fertility. These severe phenotypes are also observed in overexpression lines of G3720 from corn, which is the most similar gene to G3726 in the study group.

[1877] Potential applications. The morphological phenotypes observed in these lines may indicate that expression of G3726 may require optimization with tissue-specific or conditional promoters to enhance potential utility in drought tolerance or plant architecture. The gene may be used to regulate developmental traits such as flowering time and branching. Results from cold stress plate and soil drought assays indicate that this gene may be a good candidate for increasing tolerance to low temperature and drought conditions.

G3804 (SEQ ID NO: 191 and 192; Zea mays)—Constitutive 35S

[1878] Background. G3804 is a WRKY gene from Zea mays and is a closely-related homolog of G1274. Based on our phylogenetic analysis, there are two separate clades representing potential monocot homologs of G1274, and this gene is most closely related to G3727 and G3728 from corn. The clone obtained for G3804 may actually represent a variant of G3728. The aim of this study was to assess the role of G3804 in drought stress-related tolerance, and to compare the overexpression effects with those of other G1274-related genes.

[1879] Morphological Observations. A total of twenty 35S::G3804 lines were isolated (301-320). G3804 induced dwarfing, poor root growth on selection plates, altered flowering-time and lethality when overexpressed in Arabidopsis. Plants were typically small and bushy compared to controls; however the phenotype varied among lines. Many of the lines showed flower buds sooner than wild-type, but then developed more slowly than wild-type during the inflorescence phase. Dues to the dwarfing in these lines, seed yield was very poor. However, lines 302 and 319 had trilocular siliques.

[1880] Physiology (Plate assays) Results. Four of ten 35S::G3804 lines were more tolerant to cold in a germination assay compared to wild-type seedlings.

[1881] Physiology (Soil Drought-Clay Pot) Summary. 35S::G3804 lines showed an excellent performance in soil drought screens. Each of three independent lines performed better than wild-type on each of two different plant dates.

TABLE 83
35S::G3804 drought assay results:

| | | Mean | Mean | p-value for | Mean | Mean | p-value for |
|---|---|---|---|---|---|---|---|
| | Project | drought | drought | drought score | survival for | survival for | difference in |
| Line | Type | score line | score control | difference | line | control | survival |
| 304 | DPF | 3.5 | 0.70 | 0.00016* | 0.60 | 0.21 | 0.00000000015* |
| 304 | DPF | 3.5 | 1.5 | 0.0043* | 0.71 | 0.46 | 0.000028* |
| 307 | DPF | 2.6 | 1.3 | 0.0015* | 0.56 | 0.34 | 0.00022* |
| 307 | DPF | 2.5 | 1.7 | 0.088* | 0.74 | 0.55 | 0.00083* |
| 309 | DPF | 3.0 | 1.1 | 0.0020* | 0.60 | 0.29 | 0.00000028* |
| 309 | DPF | 2.7 | 0.90 | 0.0017* | 0.51 | 0.25 | 0.000013* |

DPF = direct promoter fusion project
Survival = proportion of plants in each pot that survived
Drought scale: 6 (highest score) = no stress symptoms, 0 (lowest score; most severe effect) = extreme stress symptoms
*line performed better than control (significant at P < 0.11)

[1882] Discussion. 35S::G3804 lines showed an excellent performance in soil drought assays. Additionally 40% of the lines tested in a cold germination assay were more tolerant than wild-type controls. Morphologically, these lines showed similar phenotypes as the other G1274-related genes including lethality, dwarfing, loss of apical dominance, as well as changes in flowering time and leaf shape. At a low frequency, these lines also produced trilocular siliques containing more seeds than wild-type. Based on these phenotypes, G3804 has a comparable activity to the G1274 protein.

[1883] Potential applications. Based on the results obtained, G3804 could be applied to produce tolerance to abiotic stresses such as cold and drought. However, the morphological phenotypes observed in these lines may indicate that expression of G3804 could require optimization with tissue-specific or conditional promoters to enhanced potential utility in drought tolerance or to increase yield. The gene might also be used to regulate developmental traits such as flowering time, branching, fruit development and seed yield.

### The G1792 Clade

[1884] G1792 (SEQ ID NO: 221 and 222; Arabidopsis thialiana)—Constitutive 35S

[1885] Background. G1792 overexpressing lines showed enhanced tolerance to drought in a soil drought assay and enhanced resistance to multiple pathogens. 35S::G1792 lines were also more tolerant to low nitrogen conditions. We have assigned the name TDR1 (Transcriptional regulator of the Defense Response 1) to this gene, based on its apparent role in disease responses.

[1886] Morphological Observations. Twenty 35S::G1792 direct fusion lines (Lines 301-320) and thirty-seven 35S::G1792 two-component lines (Lines 401-420 and 521-537) were isolated. The overexpression of G1792 consistently induced dwarfing and dark green coloration in Arabidopsis. The effects of overexpression were more severe in the two-component lines, as dwarfing occurred earlier (at 7 days), and the degree of dwarfing in later stages of development was also more generally more pronounced.

[1887] Although all plants were smaller than wild-type there were size variations evident in the both the direct fusion and two component T1 plants. Flowering time was consistently late in the transgenic lines, and the leaves of the overexpression lines were shiny compared to the controls. One direct fusion line (302) was grayish green, and had flat leaves.

[1888] Physiology (Plate assays) Results. 35S::G1792 lines (direct promoter fusion and two component) had a better performance in a C/N sensing assay and growth under low N compared with wild-type seedlings. In addition, some direct promoter and two component lines showed greater tolerance to severe dehydration and cold conditions than wild type controls in growth assays.

[1889] Discussion. Both two-component and direct promoter fusion 35S::G1792 lines have been established. Overexpression of G1792 consistently induced dwarfing and dark green coloration in Arabidopsis. The degree of dwarfing was generally more severe in the two-component lines. Flowering time was consistently late in the transgenic lines, and the leaves of the overexpression lines were shiny compared to the controls.

[1890] Consistent with results obtained in the genomics program, 35S::G1792 lines had better performance in a C/N sensing assay and in root growth under low nitrogen than wild-type controls. In particular, under low N conditions, 35S::G1792 lines exhibited much better root growth and a higher density of root hairs compared to wild type. In addition, some lines showed tolerance to severe dehydration and cold conditions in plate based assays, phenotypes that were not uncovered in the genomics program. Seven independent lines have performed better than wild-type in the clay pot soil drought screen in one or more plant dates; one line (#12) performed significantly worse on two occasions.

[1891] Five of eight 35S::G1792 lines tested were significantly more resistant to Botrytis in a plate assay. No lines tested showed enhanced resistance to Sclerotinia, consistent with previous observations in the genomics program.

[1892] Potential applications. The results obtained to date indicate that G1792 and its related genes have a number of potential applications in crop plants, including improving tolerance to drought and other abiotic stresses, enhancing growth on limiting nitrogen, and increasing disease resistance, if expressed under appropriate promoters. Additionally, G1792 could be used to manipulate developmental traits such as flowering time, wax deposition, leaf shape, and root development.

G1792 (SEQ ID NO: 221 and 222; Arabidopsis thaliana)—Leaf-Specific RBCS3

[1893] Background. The aim of this project was to determine whether expression of G1792 from an RBCS3 promoter, which drives expression in photosynthetic tissues, is sufficient to confer drought tolerance or pathogen resistance, and whether restricting G1792 expression to these tissues can overcome the negative side effects (stunting, late development) of G1792 expression.

[1894] Morphological Observations. Twenty RBCS3::G1792 lines were isolated (361-380). Lines 361-369, 371, 375 and 376 were slightly small in size and slightly dark in coloration. All other lines were equivalent to control lines. Lines 368, 369, 371, 372 and 374-377 were late developing.

[1895] Physiology Results. Three out of ten RBCS3::G1792 lines performed better than wild-type seedlings when germinated in the presence of sodium chloride.

[1896] Disease Summary: Five RBCS3::G1792 two-component lines were tested in Sclerotinia and Botrytis plate assays. Three of these lines (373, 378, and 379) were more resistant than comparable control plants to Botrytis. No change in Sclerotinia resistance was observed in any of the lines.

[1897] N.B. TDR1 (Transcriptional regulator of the Defense Response) is the gene name for G1792. The control used in this experiment was the RBCS3 promoter background supertransformed with a GUS target gene.

[1898] Discussion. The majority of RBCS3::G1792 lines were slightly smaller, darker green, and later developing than controls, but these phenotypes were much less severe than those of 35S::G1792 plants. Three out of ten lines showed enhanced tolerance to sodium chloride in a germination assay. These lines were tested in the soil drought assay, but did not show enhanced drought tolerance. Three of five lines tested in disease assays showed enhanced resistance to Botrytis.

[1899] Potential applications. The results obtained to date indicate that expression of G1792 in photosynthetic tissue may enhance disease resistance and tolerance to abiotic stresses such as high salt, while alleviating the deleterious effects on morphology that are associated with constitutive expression.

G1792 (SEQ ID NO: 221 and 222; Arabidopsis thaliana)—GR Fusion (Dex Inducible)

[1900] Background. Two-component G1792 dexamethasone-inducible lines were created. Since G1792 produces dwarfing when overexpressed, the dexamethasone-inducible lines were generated to allow us to test lines in disease assays after dexamethasone application. N-terminal and C-terminal direct GR fusions to G1792 have also been created. If it is demonstrated that the fusion proteins are functional, these lines could also be used in microarray experiments.

[1901] Morphological Observations. The following sets of dexamethasone inducible lines have been generated:

[1902] Two-component lines:

[1903] Lines 321-340:

[1904] All T1 lines appeared wild type in the absence of dex, except for 328 which was late flowering

[1905] A number of lines were morphologically examined in subsequent generations and all showed a wild-type phenotype in the absence of dexamethasone.

[1906] Homozygous T3 generation populations have now been established for three lines: 334, 337, 340.

[1907] Direct Fusion Lines:

[1908] Lines 681-700 (containing a 35S::G1792-GR fusion):

[1909] In the absence of dex, all T1 plants were small at early stages. A number of lines also were early flowering (#682, 684, 685, 688, 689, 691, 692, 694, 699, 700)

[1910] Lines 720-740 (containing a 35S::GR-G1792 fusion):

[1911] In the absence of dexamethasone, these T1 lines appeared wild type except for a number of lines that showed early flowering (#729, 732, 733, 735, 736 and 738-740)

[1912] Disease Summary Eight two-component dexamethasone (dex)-inducible G1792 lines were tested in Sclerotinia, Botrytis, and Fusarium plate assays. Seven of these lines showed moderate to strong resistance to Botrytis when grown on plates containing dex. Two lines were more resistant to Fusarium than wild-type controls. No change in Sclerotinia resistance was observed. These lines did not show enhanced Botrytis resistance when grown on regular (minus dex) plates. The control used in this experiment was the dex-inducible promoter background supertransformed with a GUS target gene.

[1913] Physiology (Plate assays) Results. Of the abiotic stress analyses performed thus far, 5 of 10 G1792-GR fusion (dex inducible) lines had greater tolerance to severe dehydration than wild type-controls. Four of 10 lines had more root growth under low nitrogen conditions than wild-type controls.

[1914] Discussion. The two-component dexamethasone-inducible lines that have been created are wild-type in morphology. Two-component dexamethasone (dex)-inducible G1792 lines showed moderate to strong resistance to Botrytis and Fusarium when grown on plates containing dex. No change in Sclerotinia resistance was observed (35S::G1792 overexpression also does not confer Sclerotinia resistance).

[1915] A number of lines carrying the G1792 N-terminal and C-terminal direct GR fusion constructs were early flowering. In addition, the C-terminal lines were also smaller at early growth stages

[1916] Potential applications. The results obtained to date indicate that expression of G1792 under an inducible promoter could be used to produce tolerance to desiccating conditions, and disease resistance, while mitigating the negative side effects of G1792 overexpression.

G1792 (SEQ ID NO: 221 and 222; Arabidopsis thaliana)—Point Mutation

[1917] Background. The aim of this project was to investigate the role of four key conserved amino acids in the “EDLL” domain, which is conserved in the C-terminal end of the G1792 protein and its paralogs and orthologs. Each mutation changes one of these conserved amino acids: site-directed mutation_{—}1, E119V; site-directed mutation_{—}2, D124G; site-directed mutation_{—}3, L128G; site-directed mutation_{—}4, L132G.

[1918] Morphological Observations. Overexpression lines for each of four different mutagenized variants of G1792 have now been generated. The first of these sets of lines (G1792(E119V)) showed similar phenotype to G1792 overexpression; dark shiny curled leaves and dwarfing. Lines for the other variants, though, show much less severe dwarfing and lacked the glossy appearance. Instead, these other sets of lines had a rather dull silvery coloration, which perhaps indicated a change in wax composition at the leaf surface.

[1919] (1) Lines 961-980 (containing 35S::G1792(E119V)): all were markedly small with narrow, dark green, shiny leaves. The following lines were also very slow developing and bolted later than wild-type: 961, 965, 966, 968, 970, 971, 975, 977, 979, and 980.

[1920] (2) Lines 981-997 (containing 35S::G1792(D124G)): all were slightly small at early stages. Later, the lines were of wild-type size, but some (#982, 983, 984, 987, 991, 992, 993) had leaves that were flat, dull green in coloration, and showed slight serrations on the margins. At later stages, the leaves of these lines became rather contorted. Some of the lines were also late flowering: 982-984, 991-993 and 997.

[1921] (3) Lines 1001-1006 (containing 35S::G1792(L128G)): all were small at early stages. At later stages 4/6 of these lines (1003-1006) developed rather flat leaves that had a grayish silvery appearance. These lines were also slightly late flowering and showed a reduction in apical dominance. #1002 was tiny and #1001 appeared wild type at later stages.

[1922] (4) Lines 1021-1024 (containing 35S::G1792(L132G)): all were small at early stages. Later the plants were dull in coloration and developed dull, flat leaves with slightly serrated margins. A reduction in apical dominance was also apparent at late stages. #1022 was small, bushy, and had curled leaves versus wild-type.

[1923] Physiology (Plate assays) Results. In tests performed thus far, several of the lines harboring mutagenized variants of G1792 were more tolerant, relative to controls, in plate-based abiotic stress assays. Lines overexpressing site-directed mutation (2) had a higher rate of germination than controls under low nitrogen and high sucrose conditions (4 of 10 lines in this C/N sensing assay), less anthocyanin on basal media minus nitrogen plus 3% sucrose and 1 mM glutamine (6 of 10 lines in this second C/N sensing assay), and more root mass on a low nitrogen root growth assay (5 of 10 lines in this nutrient limitation assay).

[1924] Physiology (Soil Drought-Clay Pot) Summary. Two lines of mutagenized variants of G1792 were tested in the soil drought screen and showed a significantly better performance than wild-type controls.

TABLE 84
G1792 Point mutation drought assay results:

| | | Mean | Mean | p-value for | Mean | Mean | p-value for |
|---|---|---|---|---|---|---|---|
| | Project | drought | drought score | drought score | survival for | survival for | difference in |
| Line | Type | score line | control | difference | line | control | survival |
| 982 | Site Dir | 1.5 | 1.4 | 0.57 | 0.35 | 0.32 | 0.61 |
| | Mut 2 | | | | | | |
| 982 | Site Dir | 2.2 | 1.0 | 0.0018* | 0.41 | 0.31 | 0.11* |
| | Mut 2 | | | | | | |
| 986 | Site Dir | 3.2 | 2.3 | 0.092* | 0.76 | 0.62 | 0.015* |
| | Mut 2 | | | | | | |
| 986 | Site Dir | 2.4 | 1.9 | 0.21 | 0.54 | 0.48 | 0.34 |
| | Mut 2 | | | | | | |

Site Dir Mut 2 = Site directed mutation (2) project
Survival = proportion of plants in each pot that survived
Drought scale: 6 (highest score) = no stress symptoms, 0 (lowest score; most severe effect) = extreme stress symptoms
*line performed better than control (significant at P < 0.11)

[1925] Discussion. Overexpression lines for each of these mutagenized variants of G1792 have now been generated. The first of these sets of lines (G1792(E119V)) showed similar phenotype to G1792 overexpression: dark, shiny, curled leaves and dwarfing. Lines for the other variants, though, show much less severe dwarfing and lacked the glossy appearance. Instead, these other sets of lines had a rather dull silvery coloration, which perhaps indicated a change in wax composition at the leaf surface. A similar phenotype was observed in a minority of lines for the G1792 deletion variant in which the EDLL domain was deleted, suggesting that this may represent a dominant negative phenotype.

[1926] Two different lines ectopically expressing site-directed mutagenesis #2 were more tolerant to drought than controls.

[1927] Potential Applications. Lines overexpressing G1792 with site-directed mutation (2) are likely to have better quality and greater yield in low nitrogen conditions or in drought conditions.

G1791 (SEQ ID NO: 229 and 230; Arabidopsis thaliana)—Vascular-Specific SUC2

[1928] Background. G1791 is a paralog of G1792. We have named G1791 TDR2 (Transcriptional regulator of the Defense Response 2).

[1929] The aim of this project was to determine whether expression of G1791 from a SUC2 promoter, which predominantly drives expression in a vascular specific pattern, is sufficient to confer pathogen resistance or drought tolerance, and whether expression of G1791 in vascular tissue causes any of the negative side effects of G1791 expression (stunting, delayed development and flowering).

[1930] Morphological Observations. Twenty SUC2_line12::G1791 lines have been isolated (741-761). Lines 748 and 757 died early in development. Lines 741-747 and 755 were small (20% control size). Lines 741, 742, 744, 745 and 755 were dark green and shiny. All lines were generally late flowering compared to control plants.

[1931] Physiology (Plate assays) Results. In tests performed thus far, several of the lines harboring mutagenized variants of G1791 under the regulator control of the SUC2 promoter showed altered C/N sensing. Three of 10 lines had a higher rate of germination than controls under low nitrogen and high sucrose conditions, and seedling of 5 of 10 lines had less anthocyanin on basal media minus nitrogen plus 3% sucrose and 1 mM glutamine.

[1932] Discussion. A set of two-component SUC2::G1791 lines has been isolated. A number of these lines were significantly smaller than controls, and some were dark green and shiny. All lines were late flowering. These phenotypes are similar to those caused by constitutive overexpression of members of the G1792 clade, although much less severe than seen in 35S::G1791 plants. These results suggest that expression of G1791 in vascular tissue may contribute to the deleterious effects seen in 35S::G1791 plants.

[1933] Potential applications. Based on the data so far, expression of G1791 in a vascular pattern may be used to modify developmental traits such as flowering time. These plants may also perform better under conditions of nitrogen limitation.

G1791 (SEQ ID NO: 229 and 230; Arabidopsis thaliana)—Epidermal-Specific LTP1

[1934] Background. The aim of this project was to determine whether expression of G1791 from an LTP1 promoter (which predominantly drives expression in the shoot epidermis and vascular tissue) is sufficient to confer pathogen resistance or drought tolerance, and whether expression of G1791 in epidermal and vascular tissue causes any of the negative side effects of G1791 expression (stunting, delayed development and flowering).

[1935] Morphological Observations. Thirty-two LTP1::G1791 lines were isolated (lines 321-332 and 381-400). No consistent differences to controls were observed.

[1936] Disease Summary: Five LTP1::G1791 two-component lines were tested in Sclerotinia and Botrytis plate assays, Two of these lines showed moderate resistance to Botrytis; the disease response to Sclerotinia was not affected.

[1937] N.B. TDR2 (Transcriptional regulator of the Defense Response) is the gene name for G1791. The control used in this experiment was the LTP1 promoter background supertransformed with a GUS target gene.

[1938] Discussion. LTP1::G1791 lines did not show any significant morphological differences to wild-type controls. Five LTP1::G1791 lines were analyzed for disease resistance: two of these lines showed enhanced resistance to Botrytis, but none to Sclerotinia. These lines have not yet been assayed for powdery mildew resistance; these assays will be of interest because powdery mildew infects only epidermal cells. Ten lines were tested in plate-based abiotic stress assays; no consistent enhanced tolerance was seen in any assay.

[1939] Potential applications. The results obtained to date indicate that expression of G1791 under an LTP1 promoter may enhance disease resistance (while minimizing deleterious growth effects seen with constitutive expression).

G1791 (SEQ ID NO: 229 and 230; Arabidopsis thaliana)—Epidermal-Specific CUT1

[1940] Background. The aim of this project was to determine whether expression of G1791 from a CUT1 promoter (which predominantly drives expression in a shoot epidermal pattern, with high levels of expression in guard cells) is sufficient to confer pathogen resistance or drought tolerance, and whether expression of G1791 in epidermal tissue causes any of the negative side effects of G1791 expression (stunting, delayed development and flowering).

[1941] Morphological Observations. Twenty six CUT1::G1791 lines were isolated in two batches (581-591 and 661-675). CUT1::G1791 plants were typically smaller than controls early in development, and approximately one-third of the lines were slightly late developing compared to controls. No other differences were evident.

[1942] Disease Summary. Six of eight CUT1::G1791 two-component lines showed moderate resistance to Sclerotinia in plate assays. The disease response to Botrytis was not affected.

[1943] N.B. TDR2 (Transcriptional regulator of the Defense Response) is the gene name for G1791. The control used in this experiment was the CUT1 promoter background supertransformed with a GUS target gene.

[1944] Physiology (Plate assays) Results. Three out of ten CUT1::G1791 lines were more tolerant to a severe dehydration stress compared with wild-type seedlings.

[1945] Discussion. CUT1::G1791 plants were typically smaller than controls early in development, and approximately one-third of the lines were slightly late developing compared to controls. Three out of ten CUT1::G1791 lines were more tolerant to a severe dehydration stress than controls in a plate assay.

[1946] Potential applications. The results obtained to date indicate that expression of G1791 under a CUT1 promoter may enhance abiotic stress tolerance while decreasing the negative side effects of constitutive G1791 expression.

G1791 (SEQ ID NO: 229 and 230; Arabidopsis thaliana)—Leaf-Specific RBCS3

[1947] Background. The aim of this project was to determine whether expression of G1791 from an RBCS3 promoter, which drives expression in photosynthetic tissue, is sufficient to confer pathogen resistance, and whether restricting expression of G1791 to photosynthetic tissue can alleviate the negative side effects of G1791 expression (stunting, delayed development and flowering).

[1948] Morphological Observations. Twenty RBCS3::G1791 lines have been isolated (361-380). Overall they were not consistently different from control lines. Lines 367, 368 and 373 were slightly smaller than controls and lines 362, 363, 367 and 368 were slightly late flowering.

[1949] Physiology (Plate assays) Results. Five out of ten RBCS3::G1791 lines were insensitive to ABA in a germination assay. Three of these lines were more tolerant than controls to cold in a chilling growth assay.

[1950] Discussion. In general, the two-component RBCS3::G1791 lines examined showed no consistent morphological differences from controls, although four lines were slightly late flowering. Five RBCS3::G1791 lines were analyzed for Botrytis and Sclerotinia resistance through the SBIR grant, and no consistent disease resistance phenotype was found. The lines were tested in plate based assays and showed a better performance than controls in ABA germination and cold growth assays.

[1951] Potential applications. The RBCS3::G1791 combination may be used to confer tolerance to abiotic stress such as cold and drought (while minimizing deleterious growth effects seen with constitutive expression).

G1791 (SEQ ID NO: 229 and 230; Arabidopsis thaliana)—GR Fusion (Dex Inducible)

[1952] Background. Since G1791 produces severe dwarfing when overexpressed, the dexamethasone-inducible lines the lines were generated to allow us to test lines in disease assays with simultaneous dexamethasone applications.

[1953] Morphological Observations. The following sets of dexamethasone inducible lines have been generated:

[1954] Two-Component Lines:

[1955] Lines 341-360:

[1956] All T1 lines appeared wild type in the absence of dex, except for 342 which was dark green and dwarfed.

[1957] Direct Fusion Lines:

[1958] Lines 641-660 (containing a 35S::G1791-GR fusion):

[1959] Many of these T1 lines were dwarfed and showed rather long petioles in the absence of dex. (#641, 642, 644, 646, 647, 649, 654 had long petioles and 643, 645, 650-653, 655, 656-660 were small.) Some alterations in flowering time were observed: 642, 644, 648, 649, 651, 652, 654, 657, 660 were early developing, whereas #653 and 656 were slightly late flowering. #643 was tiny and dark green. In other respects, the lines showed no consistent differences to controls.

[1960] Lines 710-720 (Containing a 35S::GR-G1791 Fusion):

[1961] These T1 lines appeared wild type except for 702, 712-714, and 720 which were slightly early flowering.

[1962] Disease Summary. Five two-component dexamethasone (dex)-inducible G1791 lines were tested in Sclerotinia and Botrytis plate assays. Three of these lines showed moderate to strong resistance to both pathogens when grown on plates containing dex. Of these three lines, two (351 and 353) did not show enhanced resistance when grown on regular (minus dex) plates, as expected. Line 350 did have increased resistance to both pathogens on regular plates, however the degree of resistance was lower than on dex-containing plates. This apparent “leakiness” of the transgene in line 350 could be attributed to a position effect of the insertion site of the target construct.

[1963] N.B. TDR2 (Transcriptional regulator of the Defense Response) is the gene name for G1791. The control used in this experiment was the dex-inducible promoter background supertransformed with a GUS target gene.

[1964] Discussion. A set of two-component lines was obtained. In the absence of dexamethasone, these plants appeared wild type. Five of these lines were tested in disease assays, and three lines showed moderate to strong resistance to Sclerotinia and Botrytis when pre-treated with dexamethasone.

[1965] N-terminal and C-terminal direct GR fusions to G1791 were also obtained. A relatively high number of the 35S::G1791-GR lines showed dwarfing and long petioles in the absence of Dex, perhaps indicating that these fusions are not confined to the cytoplasm, or that they exert negative effects in the cytoplasm. The 35S::GR-G1791 lines appeared wild type.

[1966] Potential applications. The results obtained to date indicate that expression of G1791 under an inducible promoter may be sufficient to provide enhanced disease resistance.

G1795 (SEQ ID NO: 223 and 224; Arabidopsis thaliana)—Vascular-Specific SUC2

[1967] Background. G1795 is a paralog of G1792. Analysis of G1795 under alternative promoters for disease resistance was initiated, and it was found in this work that expression of G1795 under a green tissue or inducible promoter can confer Botrytis and Sclerotinia resistance. We have named G1795 TDR3 (Transcriptional regulator of the Defense Response 3).

[1968] The aim of this project was to determine whether expression of G1795 from a SUC2 promoter, which predominantly drives expression in a vascular specific pattern, is sufficient to confer drought tolerance or pathogen resistance, and whether expression of G1795 in vascular tissue causes any of the negative side effects of G1795 expression (stunting, delayed development and sterility).

[1969] Morphological Observations. Twenty SUC2::G1795 (2-component) lines were isolated (481-500). These lines were consistently small and late flowering, and leaves were consistently shiny and narrow. The exception was line 482 which appeared wild type.

[1970] Physiology (Plate assays) Results. Six out of ten SUC2::G1795 lines were darker green in a germination assay in the presence of mannitol. Five of these lines were also insensitive to ABA in another germination assay. Three of these lines also had more root growth in a growth assay under limited nitrogen. Four lines were also more tolerate to a severe dehydration stress compared to wild-type seedlings.

[1971] Discussion. SUC2::G1795 plants were consistently small and late flowering, with shiny, narrow leaves. These phenotypes are consistent with those seen with overexpression of other members of the G1792 clade. However, these effects were not as severe as those seen in constitutively-overexpressing 35S::G1795 plants. Several SUC2::G1795 lines were insensitive to ABA, tolerant to mannitol in germination assays, showed more root growth than controls on limited nitrogen, and showed enhanced tolerance to severe dehydration. Therefore, it seems that expression of G1795 in vascular tissue can confer abiotic stress tolerance, but is associated with some lesser degree of deleterious morphological effects when expression is regulated by a vascular, rather than constitutive, promoter.

[1972] Potential applications. The results obtained to date indicate that expression of G1795 under a vascular promoter may enhance abiotic stress tolerance, while reducing the deleterious side effects conferred by constitutive G1795 expression. However, it should be noted that substantial morphological off-types were still seen in SUC2::G1795 lines. In addition to stress tolerance, this gene might also be used to influence developmental traits such as flowering time, leaf shape, and surface wax accumulation.

G1795 (SEQ ID NO: 223 and 224; Arabidopsis thaliana)—Epidermal-Specific CUT1

[1973] Background. The aim of this project was to determine whether expression of G1795 from an CUT1 promoter (which predominantly drives expression in vascular tissue) is sufficient to confer pathogen resistance, and whether expression of G1795 in epidermal and/or vascular tissue causes any of the negative side effects of G1795 expression (stunting, delayed development and sterility).

[1974] Morphological Observations. Twenty-one CUT1::G1795 lines were isolated. These lines were generally small, dark green and the majority were also late flowering. They also typically had shiny leaves. The degree of severity of these traits was variable.

[1975] Disease Summary. Eight CUT1::G1795 lines were tested in a Sclerotinia plate assay. Three lines were more resistant than controls to this pathogen.

G1795 (SEQ ID NO: 223 and 224; Arabidopsis thaliana)—Epidermal-Specific LTP1

[1976] Background. The aim of this project was to determine whether expression of G1795 from an LTP1 promoter (which predominantly drives expression in the shoot epidermis and vascular tissue) is sufficient to confer pathogen resistance or drought tolerance, and whether expression of G1795 in epidermal and/or vascular tissue causes any of the negative side effects of G1795 expression (stunting, delayed development and sterility).

[1977] Morphological Observations. Twenty LTP1::G1795 lines were isolated (301-320). All lines were small and dark, starting during the vegetative phase of development. Lines 301-303 and 306 were late flowering. Lines 301, 302, 308, 314-316 and 318-320 showed early senescence. Contrary to typical Arabidopsis development, late flowering and early senescence were seen in some of the same LTP1::G1795 plants.

[1978] Disease Summary. Eight LTP1::G1795 two-component lines were tested in a Sclerotinia plate assay and five lines were tested in a Botrytis plate assay. Five lines showed moderate to strong resistance to Sclerotinia, and four lines showed enhanced resistance to Botrytis.

[1979] Three lines that showed Sclerotinia resistance were tested in a soil-based assay. All three lines showed better survival than controls after 4 days in one run of this assay.

[1980] N.B. TDR3 (Transcriptional regulator of the Defense Response) is the gene name for G1795. The control used in this experiment was the LTP1 promoter background supertransformed with a GUS target gene.

[1981] Discussion. All LTP1::G1795 lines analyzed were small and dark green. A few lines were late flowering, and several showed early senescence, including some of the late flowering plants. The small, dark green, and late flowering phenotypes are typical of members of the G1792 clade (though much less severe than seen in 35S::G1795 plants), but early senescence (indicating that G1795 might regulate senescence pathways) has not been noted in this study group before.

[1982] Five LTP1::G1795 two-component lines were tested in Sclerotinia and Botrytis plate assays. Three of these lines showed moderate to strong resistance to Sclerotinia and Botrytis, and a fourth line displayed enhanced resistance only to Botrytis. These lines have not yet been tested in powdery mildew assays. In contrast, LTP1::G1795 showed a wild-type response in plate-based abiotic stress assays.

[1983] Potential applications. The results obtained to date indicate that expression of G1795 under the LTP1 promoter may enhance disease resistance. This promoter yielded less severe, but did not completely remove, the morphological and developmental adverse effects associated with constitutive G1795 overexpression.

G1795 (SEQ ID NO: 223 and 224; Arabidopsis thaliana)—Leaf-Specific RBCS3

[1984] Background: The purpose of this program was to determine if G1795 under alternative under a green tissue or inducible promoter can confer Botrytis and Sclerotinia, or other disease resistance.

[1985] Morphological Observations. Eighteen RBCS3::G1795 lines were isolated (341-343 and 381-395). All lines were small at the rosette stage of development, and had dark green leaves. All lines flowered late.

[1986] Disease Summary. Eight RBCS3:G1795 two-component lines were tested in the Sclerotinia plate assay, and six of these lines were also tested in a Botrytis plate assay. Five of these lines displayed moderate to strong enhanced resistance to both Sclerotinia and Botrytis.

[1987] Three lines that showed resistance to Sclerotinia in a plate assay were tested in a Sclerotinia soil assay. All three lines showed significantly better plant survival in one run of the assay.

[1988] N.B. TDR3 (Transcriptional regulator of the Defense Response) is the gene name for G1795. The control used in this experiment was the RBCS3 promoter background supertransformed with a GUS target gene.

[1989] Discussion. All RBCS3::G1795 lines were small with dark green leaves at the rosette stage of development, and flowered late. However, these phenotypes were much less severe than those seen in 35S::G1795 lines. Five RBCS3::G1795 two-component lines were tested in Sclerotinia and Botrytis plate assays. Four of these lines displayed moderate to strong enhanced resistance to both Sclerotinia and Botrytis. However, RBCS3::G1795 lines did not perform significantly differently from wild-type controls in plate-based abiotic stress assays.

[1990] Potential applications. The results obtained to date indicate that expression of G1795 under an RBCS3 promoter may enhance disease resistance. An RBCS3 expression pattern did not appear to achieve this while completely eliminating morphological off-types.

G30 (SEQ ID NO: 225 and 226; Arabidopsis thaliana)—Vascular SUC2

[1991] Background. G30 is a paralog of G1792. We have named G30 TDR4 (Transcriptional regulator of the Defense Response 4).

[1992] The aim of this project was to determine whether expression of G30 from a SUC2 promoter, which predominantly drives expression in a vascular specific pattern, is sufficient to confer pathogen resistance or drought tolerance, and whether expression of G30 in vascular tissue causes any of the negative side effects of G30 overexpression (stunting, delayed development, and sterility).

[1993] Morphological Observations. Twenty SUC2::G30 lines were isolated (541-560). All lines had leaves that were dark, shiny and small. Leaves were also curly vs. control. All lines also were late flowering, with the exception of line 559 which was small and dark but developed normally vs. control. After bolting, lines 543, 545, 547, 550, 552, 553, 555 and 560 were small and spindly. Line 551 had large, wide, curly leaves vs. control.

[1994] Physiology Results. Five of 10 lines were more tolerant to mannitol, 7 of 10 lines were more tolerant to cold during germination, and 3 of 10 lines were more tolerant to desiccation in a plate-based assay than controls. Seedlings of 8 of 10 lines had less anthocyanin on basal media minus nitrogen plus 3% sucrose and 1 mM glutamine in this second C/N sensing assay.

[1995] Discussion. All SUC2::G30 lines analyzed were small with dark, shiny, and curly leaves. All lines but one were late flowering. The small, dark green, and late flowering phenotypes are typical of members of the G1792 clade, though much less severe than seen in 35S::G30 plants.

[1996] Potential Applications. Plants overexpressing G30 under the regulator control of vascular promoters such as SUC2 may have greater quality and yield than non-transformed plants under conditions of nutrient (e.g., nitrogen) limitation.

G30 (SEQ ID NO: 225 and 226; Arabidopsis thaliana)—Leaf RBCS3

[1997] Background. We have named G30 TDR4 (Transcriptional regulator of the Defense Response 4). The aim of this project was to determine whether expression of G30 from an RBCS3 promoter, which drives expression in photosynthetic tissue, is sufficient to confer pathogen resistance or drought tolerance, and whether restricting the expression of G30 to photosynthetic tissue alleviates the negative side effects of G30 overexpression (stunting, delayed development and sterility).

[1998] Morphological Observations. Twenty RBCS3::G30 lines have been isolated (Lines 361-380). All of these lines were at least marginally late flowering, and had dark green/slightly wrinkled leaves. Lines 361, 368, 369 and 376 were the latest flowering lines, and lines 368 and 375 were the smallest lines (30% of controls).

[1999] Five RBCS3::G30 two-component lines were tested in Sclerotinia and Botrytis plate assays. Three of these lines (370, 374, and 377) showed moderate to strong resistance to Sclerotinia and Botrytis. Line 362 only provided enhanced Botrytis resistance.

[2000] N.B. TDR4 (Transcriptional regulator of the Defense Response) is the gene name for G30. The control used in this experiment was the RBCS3 promoter background line supertransformed with a GUS target gene.

[2001] Discussion. All the RBCS3::G30 lines characterized were at least marginally late flowering, and had dark green/slightly wrinkled leaves. The small, dark green, and late flowering phenotypes are typical of members of the G1792 clade, though much less severe than seen in 35S::G30 plants. Five RBCS3::G30 two-component lines were tested in Sclerotinia and Botrytis plate assays. Three of these lines showed moderate to strong resistance to Sclerotinia and Botrytis, while a fourth line only showed enhanced Botrytis resistance. These lines have not yet been tested in powdery mildew assays. In contrast, RBCS3::G30 lines did not perform significantly differently from wild-type controls in plate-based abiotic stress assays.

[2002] Potential applications. The results obtained to date indicate that expression of G30 under a green tissue promoter may enhance disease resistance. However, it should be noted that this promoter still resulted in developmental off-types.

G30 (SEQ ID NO: 225 and 226; Arabidopsis thaliana)—Epidermal LTP1

[2003] Background. The aim of this project was to determine whether expression of G30 from an LTP1 promoter (which predominantly drives expression in the shoot epidermis and vascular tissue) is sufficient to confer pathogen resistance or drought tolerance, and whether restricting expression of G30 to epidermal tissue alleviates any of the negative side effects of G30 expression (stunting, delayed development and sterility).

[2004] Morphological Observations. Thirteen LTP1::G30 lines were isolated from two batches of T1 plants (341-346 and 381-387. All plants were small in size and dark in color, with curling upright leaves compared to controls. All lines also flowered and developed late.

[2005] Physiology (Plate assays) Results. Three out of ten lines were more tolerant to low nitrogen in a growth assay than wild-type control seedlings. Three other lines did not accumulate anthocyanins in a cold germination assay.

[2006] Discussion. All LTP1::G30 plants analyzed were small in size and dark in color, with curling upright leaves compared to controls. All lines also flowered and developed late. The small, dark green, and late flowering phenotypes are typical of members of the G1792 clade, though much less severe than seen in 35S::G30 plants.

[2007] Three out of ten LTP1::G30 lines showed more tolerance to a low nitrogen growth assay than wild-type control seedlings. Three other lines did not accumulate anthocyanins in a cold germination assay, indicating that these lines may be more tolerant to cold germination. No soil drought studies have been performed on these lines. Only one out of five lines tested showed altered performance in disease assays.

[2008] Potential applications. The results obtained to date indicate that expression of G30 under the LTP1 promoter may confer enhanced tolerance to abiotic stress. However, LTP1 lines still showed developmental off-types. There is not yet compelling evidence that the LTP1 promoter is a suitable promoter to use in combination with G30 to produce enhanced disease resistance.

G30 (SEQ ID NO: 225 and 226; Arabidopsis thaliana)—Emergent Leaf primordia AS1

[2009] Background. The aim of this project was to determine whether expression of G30 from an AS1 promoter, which drives expression in emergent leaf primordia, causes any of the negative side effects of G30 overexpression (stunting, delayed development and sterility).

[2010] Morphological Observations. Twenty AS1::G30 lines have been isolated (741-760). Seedlings typically had long hypocotyls and upward pointing cotyledons. Lines 741, 747, 752, 758 and 759 were slightly darker green prior to flowering, and all lines had upward pointing rosette leaves.

[2011] At the time of bolting, lines 741-744, 746-749, 752, 753 and 757-759 were small (30-60% control size). Lines 744, 746, 748-750, 752, 753 and 757-759 were dark green in coloration. Lines 744, 746, 749, 750 and 757 are late developing vs. control. These phenotypes continued to be evident throughout later development.

[2012] Discussion. AS1::G30 seedlings typically had long hypocotyls and upward pointing cotyledons. All lines also had upward pointing rosette leaves, indicating that the gene influences light-regulated development. At the time of bolting, most lines were small and dark green, and several were late flowering. The small, dark green, and late flowering phenotypes are typical of members of the G1792 clade, though much less severe than those seen in 35S::G30 plants.

[2013] Potential Applications. Plants overexpressing G30 under the regulatory control of emergent leaf primordia promoters such as AS1 have morphological and developmental effects that are much less severe than plants constitutively expressing this gene, and thus this combination may be used to manipulate photosynthetic rate, light-regulated development and flowering time without the severe effects seen in the latter plants.

G30 (SEQ ID NO: 225 and 226; Arabidopsis thaliana)—GR Fusion (Dex Inducible)

[2014] Background. Since G30 produces severe dwarfing when overexpressed, dexamethasone-inducible lines were generated to allow us to test lines in disease assays after dexamethasone application.

[2015] Morphological Observations. The following sets of dexamethasone inducible lines have been generated:

[2016] Two-Component Lines:

[2017] Lines 321-340:

[2018] All were dwarfed (except #339) in the T1 generation and showed a phenotype similar to, but less severe than 35S::G30 lines. These phenotypes were seen in the absence of dexamethasone suggesting that the lines were “leaky.”

[2019] Interestingly, though, in later generations, three of these lines were morphologically examined, and appeared wild type in the absence of dexamethasone. Homozygous T3 generation populations have now been established for each of these lines (321, 322, 339, see table below).

[2020] Direct Fusion lines:

[2021] Lines 621-640 (containing a 35S::G30-GR Fusion):

[2022] The majority of these use T1 lines appeared wild type in the absence of dexamethasone except for 622, 625, 626, 637 which were dwarfed with shiny leaves. Some of the lines were slightly early flowering (#631, 632, 634, 636, 638-640).

[2023] Lines 621-640 (containing a 35S::GR-G30 fusion):

[2024] These lines were of wild-type size, but a substantial number of the lines were early flowering in the absence of dexamethasone: 643, 644, 646, 647, 650-656, 658-660.

[2025] Disease Summary. Five two-component dexamethasone (dex)-inducible G30 lines were tested in Sclerotinia and Botrytis plate assays. Three of these lines (321, 322, and 339) showed strong resistance to Sclerotinia and Botrytis when grown on plates containing dex. Line 321 also provided enhanced pathogen resistance on regular (minus dex) plates, however the degree of resistance was lower than on dex-containing plates. This apparent “leakiness” of the transgene in line 321 could be attributed to a position effect of the insertion site of the target construct.

[2026] N.B. TDR4 (Transcriptional regulator of the Defense Response) is the gene name for G30. The control used in this experiment was the dex-inducible promoter background supertransformed with a GUS target gene.

[2027] Physiology Results. Dexamethasone-inducible G30 lines were more tolerant to abiotic stresses. These included salt (5 of 10 lines), mannitol (hyperosmotic stress; 7/10), ABA (5 of 10 lines), and heat during germination (6 of 10 lines).

[2028] Discussion. Dexamethasone (dex) inducible G30 overexpression lines have been established using the two-component system. All but one line were dwarfed in the T1 generation and showed a phenotype similar to, but less severe than 35S::G30 lines, suggesting that G30 expression was not tightly off in these lines. It impossible that this is due to regulatory sequences present in the UTR or coding sequence in the opLexA::G30 construct, although relatively little 5′ or 3′ UTR is present. However, in later generations, such dwarfing effects were much less apparent.

[2029] Five two-component dexamethasone (dex)-inducible G30 lines were tested in Sclerotinia and Botrytis plate assays. Three of these lines showed strong resistance to Sclerotinia and Botrytis when grown on plates containing dex. One line also provided enhanced pathogen resistance on regular (minus dex) plates, however the degree of resistance was lower than on dex-containing plates. This apparent “leakiness” of the transgene is consistent with the morphological phenotypes observed in the absence of dex.

[2030] N-terminal and C-terminal direct GR fusions to G30 have also been created. The majority of lines produced for each construct were of wild-type size, but some were early flowering. No disease assays have been performed on these lines.

[2031] Potential applications. The results obtained to date indicate that expression of G30 under an inducible promoter can confer disease resistance and tolerance to various abiotic stresses without the plants developing severe off-types (developmental and/or morphological defects).

G1266 (SEQ ID NO: 253 and 254; Arabidopsis thaliana)—Constitutive 35S

[2032] Background. G1266 corresponds to ERF1 (as opposed to AtERF1, which corresponds to G28), a gene with known functions in ethylene/jasmonate and disease signal transduction (Solano et al., 1998; Lorenzo et al., 2003). ERF1 overexpressing lines have been shown to have increased resistance to multiple pathogens (Berrocal-Lobo et al., 2002; Berrocal-Lobo and Molina, 2004), and in the genomics program we observed enhanced resistance to E. orontii. ERF1 (and potentially other ERF genes) are thought to function antagonistically to AtMYC2 to balance the ethylene/jasmonate-dependent pathogen resistance pathway against the jasmonate-dependent wound response pathway (Boter et al., 2004; Lorenzo et al., 2004). G1266 was included in this study because it is related to G1792, and because we wanted to compare the strength of the disease resistance phenotype induced by G1266 to that of other genes in the G1792 and G28 study groups.

[2033] Morphological Observations. G1266 produced severe dwarfing when overexpressed. Almost all of the lines in each of two different batches were very small, slow developing, and exhibited narrow, dark, rather shiny leaves. A total of thirty new lines have been obtained: 301-320 and 321-330.

[2034] Physiology (Plate assays) Results. Five out of ten 35S::G1266 lines were insensitive to ABA in a germination assay. Two of these lines were also tolerant to NaCl and mannitol in a germination assay. Two other lines were more tolerant to cold in another germination assay.

[2035] Disease Summary. In our earlier genomics program, G1266 overexpressing lines were found to be more tolerant to the fungal pathogen Erysiphe orontii but were wild type in their response to Sclerotinia, Botrytis, and Fusarium. Eight new 35S::G1266 lines were tested by Sclerotinia and Botrytis plate assays; several of these lines displayed altered pathogen response phenotypes. Three of these lines showed enhanced resistance to Botrytis, one line showed enhanced resistance to Sclerotinia, and one line showed enhanced resistance to both pathogens. Lines 304 and 307 displayed enhanced disease symptoms in response to Botrytis.

[2036] Discussion. 35S::G1266 plants were severely dwarfed, dark green, and late flowering, with narrow, shiny leaves. These phenotypes are consistent with those observed for plants overexpressing members of the G1792 clade.

[2037] As members of the G1792 study group, 35S::G1266 lines were analyzed in both the drought-related and disease-related screens. Five 35S::G1266 lines showed insensitivity to ABA in a germination assay. Four of these lines also produced hits in sodium chloride, mannitol, or cold germination assays. Three lines were tested in the clay pot drought assay, but no significant difference from wild-type plants was observed.

[2038] Four lines were more resistant to Botrytis in a plate assay, and two lines showed more resistance in a Sclerotinia assay. There was some overlap between lines that performed well in the plate-based abiotic stress and disease assays; three lines that were hits in the abiotic stress assays also hit in one or more disease assays.

[2039] It is possible that the ABA insensitivity and disease resistance phenotypes of 35S::G1266 plants are linked: there are known antagonistic interactions between the ethylene/jasmonate and ABA signal transduction pathways (Anderson et al., 2004). ABA suppresses basal JA/ethylene pathway signaling, ethylene insensitive mutants show increased expression of ABA-dependent reporter genes, and some ABA-insensitive mutants are more resistant to necrotrophic pathogens (Anderson et al., 2004). However, the converse (that increased JA/ethylene signaling mediated at the level of AtERF1 can suppress ABA signaling) seems plausible, but has not to our knowledge been directly demonstrated.

[2040] Potential applications. Based on the results obtained so far, G1266 may be used to increase abiotic stress tolerance or disease resistance, or modify plant development and flowering time.

G1752 (SEQ ID NO: 401 and 402; Arabidopsis thaliana)—Constitutive 35S

[2041] Background. G1752 was included in this research program because of its close relationship to G1792. G1752 is a member of an Arabidopsis sub-clade that includes G1266. The aim of this project was to determine whether overexpression of G1752 in Arabidopsis produces comparable effects to those of G1792 overexpression.

[2042] Morphological Observations. G1752 overexpressors tended to be a slightly darker green than control seedlings. Several lines were chlorotic, and had less root growth than wild-type controls. G1752 produced severe dwarfing when overexpressed. Almost all of the lines in each of two different batches were very small, slow developing, and exhibited narrow dark leaves. The most severely affected individual died at early stages.

[2043] Physiology (Plate assays) Results. Three out of seven 35S::G1752 lines were tolerant to mannitol in a germination assay.

[2044] Discussion. G1752 was highly deleterious when expressed under the 35S promoter. Most lines were severely dwarfed and slow developing, with dark green narrow leaves. These phenotypes are consistent with those observed for G1752 in the genomics program, and for some other members of the G1792 study group.

[2045] Potential applications. Based on the results obtained so far, G1752 may be applied to increase hyperosmotic stress tolerance if expressed under an appropriate promoter.

G3380 (SEQ ID NO: 249 and 250; Oryza sativa)—Constitutive 35S

[2046] Background. G3380 is a closely-related rice homolog of G1792. The aim of this study was to determine whether overexpression of G3380 can confer abiotic stress tolerance and disease resistance similarly to G1792.

[2047] Morphological Observations. The overexpression of G3380 consistently induced mild dwarfing, and a slight delay in flowering. Plants were isolated in two different batches, and in the first batch, the Ti seedlings were small and vitrified. A total of twenty-four 35S::G3380 lines were isolated: 301-311 and 321-333.

[2048] Physiology (Plate assays) Results. Five out of 10 35S::G3380 lines were more tolerant to mannitol in a germination assay than control seedlings. Six of 10 lines were also more tolerant than controls when germinated in the presence of mannitol. Three of 10 lines also showed tolerance to cold than controls in a growth assay.

[2049] Physiology (Soil Drought-Clay Pot) Summary. Three independent 35S::G3515 lines were tested in a single run of the soil drought screen and all three showed a significantly better performance than wild-type controls.

TABLE 85
35S::G3380 drought assay results.

| | | Mean | Mean | p-value for | | Mean | p-value for |
|---|---|---|---|---|---|---|---|
| | Project | drought | drought score | drought score | Mean survival | survival | difference in |
| Line | Type | score line | control | difference | for line | for control | survival |
| 301 | DPF | 2.3 | 1.4 | 0.023* | 0.41 | 0.40 | 0.90 |
| 301 | DPF | 1.5 | 1.3 | 0.59 | 0.27 | 0.22 | 0.37 |
| 307 | DPF | 3.0 | 2.0 | 0.12 | 0.54 | 0.42 | 0.043* |
| 307 | DPF | 1.9 | 1.0 | 0.00053* | 0.37 | 0.20 | 0.0022* |
| 322 | DPF | 3.0 | 1.5 | 0.00086* | 0.65 | 0.33 | 0.00000013* |
| 322 | DPF | 2.8 | 1.1 | 0.0015* | 0.57 | 0.29 | 0.0000027* |

DPF = direct promoter fusion project
Survival = proportion of plants in each pot that survived
Drought scale: 6 (highest score) = no stress symptoms, 0 (lowest score; most severe effect) = extreme stress symptoms
*line performed better than control (significant at P < 0.11)

[2050] Discussion. The overexpression of G3380 consistently induced mild dwarfing, and a slight delay in flowering. Overexpression of members of the G1792 clade tends to produce small, dark green, and late flowering plants. However, this phenotype displayed by 35S::G3380 plants is milder than for most members of the clade, and yet these overexpressors performed well in hyperosmotic, cold, and drought stress assays.

[2051] Potential applications. G3380 may be used to enhance tolerance to drought-related stresses and cold.

G3381 (SEQ ID NO: 233 and 234; Oryza sativa)—Constitutive 35S

[2052] Background. G3381 is a closely-related rice homolog of G1792. The aim of this study was to determine whether overexpression of G3381 can confer abiotic stress and disease resistance similarly to G1792.

[2053] Morphological Observations. To date, a total of six 35S::G3381 lines have been obtained (Lines 301-306), however, only one batch of plants has been evaluated. Line 301 appeared wild type, but in all other lines, the overexpression of G3381 consistently induced dwarfing, spindly leaves and dark green coloration.

[2054] Physiology (Plate assays) Results. Three out of four 35S::G3381 lines performed better than wild-type seedlings in a germination assay under cold conditions. Two of these lines also did well when germinated in the presence of mannitol. Some lines also showed tolerance to NaCl, ABA, heat, C/N sensing, and growth under low nitrogen.

[2055] Disease Summary. Five 35S::G3381 lines were tested by Sclerotinia plate assay. Lines 301, 302, and 306 displayed enhanced resistance to Sclerotinia. Three of the five lines were also tested by Botrytis plate assay. The response to this pathogen was variable: one line showed an enhanced resistance to Botrytis while another line appeared to be slightly more susceptible.

[2056] Discussion. The overexpression of G3381 induced strong dwarfing and dark green coloration, phenotypes typical of overexpression of members of the G1792 clade. Only six 35S::G3381 lines have been recovered to date. (Because of the strong phenotype associated with G3381 overexpression, RBCS3::G3381 lines are also being created for evaluation.) A limited number of 35S::G3381 lines were available for testing in stress assays: one of three lines performed well in a soil drought assay and a better performance than controls was seen in plate-based mannitol and cold germination assays. Three of five lines also showed resistance to Sclerotinia in disease assays.

[2057] Potential applications. G3381 may be used to enhance tolerance to abiotic stresses such as drought and cold. The gene might also be applied to enhance disease resistance. However, given the off-types seen with overexpression, G3381 would likely need to be optimized with tissue specific or inducible promoters.

G3383 (SEQ ID NO: 227 and 228; Oryza sativa)—Constitutive 35S

[2058] Background. G3383 is a closely-related rice homolog of G1792. The aim of this study was to determine whether overexpression of G3383 can confer abiotic stress tolerance and disease resistance similarly to G1792.

[2059] Morphological Observations. The overexpression of G3383 produced plants that were not consistently different from controls. However, Lines 303 and 307 were slightly pale and had small rosettes and spindly inflorescences. Line 304 showed reduced fertility. A total of seventeen new lines were obtained: 301-317.

[2060] Physiology (Plate assays) Results. 35S::G3383 lines have been analyzed in abiotic stress assays. Seven out of ten lines showed tolerance to cold temperatures in a growth assay. Four of these lines were also tolerant to mannitol in a germination assay. Three of the seven lines also performed better than wild-type control seedlings in a severe dehydration assay. Three lines also performed well in a cold germination assay.

[2061] Discussion. 35S::G3383 plants were not consistently different from controls in morphology. These plants produced hits in several abiotic stress assays: seven of ten lines were more tolerant to cold in a growth assay, three lines performed well in a cold germination assay, three lines showed more survival in a severe dehydration assay, and four lines showed more tolerance to germination on mannitol. No soil drought assays have been performed on these lines, and disease assays are still in progress.

[2062] Potential applications. The results obtained to date indicate that constitutive expression of G3383 may confer enhanced tolerance to abiotic stress. Importantly, unlike most of the genes from the G1792 study group, G3383 did not produce marked developmental off-types when overexpressed.

G3515 (SEQ ID NO: 237 and 238; Oryza sativa)—Constitutive 35S

[2063] Background. G3515 is a closely-related rice homolog of G1792. The aim of this study was to determine whether overexpression of G3515 can confer abiotic stress tolerance and disease resistance similarly to G1792.

[2064] Morphological Observations. The overexpression of G3515 did not induce a morphological phenotype distinct from that of the controls. Some size differences were noted early in development, but later all lines were similar in size to control plants. A total of twenty new lines have been obtained: 301-320.

[2065] Physiology (Plate assays Results. Five out of ten 35S::G3515 lines had more root growth (more root mass) and increased root hair density compared to wild-type control seedlings, when grown on plates in the absence of a stress treatment. This phenotype became stronger in some of the lines under low N conditions.

[2066] Physiology (Soil Drought-Clay Pot) Summary. Three independent 35S::G3515 lines were tested in a single run of the soil drought screen and all three showed a significantly better performance than wild-type controls.

TABLE 86
35S::G3515 drought assay results:

| | | Mean | Mean | p-value for | Mean | Mean | p-value for |
|---|---|---|---|---|---|---|---|
| | Project | drought | drought | drought score | survival for | survival for | difference in |
| Line | Type | score line | score control | difference | line | control | survival |
| 310 | DPF | 0.67 | 0.33 | 0.45 | 0.19 | 0.032 | 0.00067* |
| 313 | DPF | 1.0 | 0.33 | 0.18 | 0.27 | 0.032 | 0.000015* |
| 319 | DPF | 1.5 | 0.33 | 0.039* | 0.35 | 0.032 | 0.00000063* |

DPF = direct promoter fusion project
Survival = proportion of plants in each pot that survived
Drought scale: 6 (highest score) = no stress symptoms, 0 (lowest score; most severe effect) = extreme stress symptoms
*line performed better than control (significant at P < 0.11)

[2067] Discussion. 35S::G3515 plants were not consistently different from controls in morphology. Five out of ten lines showed more root growth in plate-based abiotic stress assays. Three independent 35S::G3515 lines were tested in a single run of the soil drought screen and all three of them showed a significantly better performance than controls. Disease assays are still in progress on these lines.

[2068] Potential applications. The results obtained to date indicate that constitutive expression of G3515 may confer enhanced tolerance to drought stress. The gene might also be used to manipulate root development. Importantly, unlike most of the genes from the G1792 study group, G3515 did not produce marked developmental off-types when overexpressed.

G3516 (SEQ ID NO: 239 and 240; Zea mays)—Constitutive 35S

[2069] Background. G3516 is a closely-related maize homolog of G1792. The aim of this study was to determine whether overexpression of G3516 can confer abiotic stress tolerance and disease resistance similarly to G1792.

[2070] Morphological Observations. Twenty 35S::G3516 lines have been isolated (Lines 301-320). Early in development these lines showed no differences compared to control plants. Later all lines showed serrated rosette leaves and many had reduced trichome density. Lines 304 and 305 had albino leaf sectors in adult plants. Late in development all lines were bushy, slightly small and spindly-leafed compared to controls.

[2071] Physiology (Plate assays) Results. 35S::G3516 lines accumulated less anthocyanins in a cold germination assay and in a germination assay designed to test C/N sensing. The overexpressors also accumulated less anthocyanin and had more root mass than controls on low nitrogen-containing medium. These results indicate that the overexpressors are more tolerant to cold and low nitrogen conditions than the wild-type controls.

[2072] Discussion. 35S::G3516 lines showed serrated rosette leaves, and many had reduced trichome density. Late in development, all lines were bushy and slightly small compared to controls. These lines accumulated less anthocyanins in a cold germination assay and in a germination assay designed to test C/N sensing. Disease assays on these lines are in progress.

[2073] Potential applications. The results obtained to date indicate that constitutive expression of G3516 may confer enhanced tolerance to abiotic stress, including cold and low nitrogen conditions.

G3517 (SEQ ID NO: 243 and 244; Zea mays)—Constitutive 35S

[2074] Background. G3517 is a closely-related maize homolog of G1792. The aim of this study was to determine whether overexpression of G3517 can confer abiotic stress tolerance and disease resistance similarly to G1792.

[2075] Morphological Observations. Twenty 35S::G3517 T1 lines were isolated (Lines 301-320). Considerable morphological variation was seen in these lines. Some of the lines were early flowering (301, 303, 305, 311, 312, 317, 320) and most of the lines showed dwarfing and rather curled leaves. The latter phenotype was particularly apparent in: 301-304, 309,310-312, 314-317.

[2076] Physiology (Plate assays) Results. Three out of ten lines performed better than wild-type seedlings in either a heat germination assay or under chilling conditions in a growth assay. Two lines were also more tolerant to severe dehydration.

[2077] Disease Results. Four of eight 35S::G3517 lines tested showed moderately to significantly greater resistance to Sclerotinia than wild type controls.

[2078] Discussion. 35S::G3517 T1 lines showed considerable variation in morphology and most were dwarfed. These lines showed enhanced tolerance to heat in a germination assay and chilling in a growth assay. However, of three lines tested in a single run of the drought assay, none performed better than wild-type.

[2079] Seven 35S::G3517 lines have been tested in pathogen plate assays to date, with variable results. Two lines showed decreased resistance to Botrytis infection, while two other lines were more resistant to Botrytis. One line showed enhanced resistance to Sclerotinia. 35S::G3517 plants showed developmental alterations when grown on plates, possibly influencing their performance in disease assays.

[2080] Potential applications. The results obtained to date indicate that constitutive expression of G3517 may confer enhanced tolerance to abiotic stress. G3517 overexpression increases Sclerotinia resistance.

G3518 (SEQ ID NO: 245 and 246; Glycine max)—Constitutive 35S

[2081] Background. G3518 is a closely-related soy homolog of G1792. The aim of this study was to determine whether overexpression of G3518 can confer abiotic stress tolerance and disease resistance similarly to G1792.

[2082] Morphological Observations. Forty two 35S::G3518 lines were isolated from 3 batches of T1 plants (Lines 301-309, 321-333 and 341-360). The overexpression of G3518 consistently induced dwarfing and dark green coloration in Arabidopsis. Overexpression lines were typically smaller than controls and considerable size variation was evident. Both late flowering (lines 344, 352 and 359) and early flowering (lines 303, 325, 326, 327 and 328) phenotypes were observed. It is interesting to note that all early flowering lines were observed in batch 1 and 2, and all late flowering lines were observed in batch 3. In many cases severe dwarfing was observed, and most lines exhibited narrow dark rather shiny contorted leaves. A small number of lines died prior to maturity.

[2083] Physiology (Plate assays) Results. Several 35S::G3518 lines performed better than wild-type seedlings in germination assays in the presence of NaCl and cold. These same lines also did well in a growth assay under cold conditions and in a C/N sensing assay. Several lines performed poorly in a heat growth assay: seedlings flowered earlier, suggesting they were stressed relative to wild-type and several had brown roots.

[2084] Physiology (Soil Drought-Clay Pot) Summary. Three lines performed better than controls in drought and/or drought recovery assays.

TABLE 87
35S::G3518 drought assay results:

| | | Mean | Mean | p-value for | Mean | | p-value for |
|---|---|---|---|---|---|---|---|
| | Project | drought | drought score | drought score | survival for | Mean survival | difference in |
| Line | Type | score line | control | difference | line | for control | survival |
| 323 | DPF | 2.0 | 1.4 | 0.053* | 0.37 | 0.33 | 0.45 |
| 323 | DPF | 1.3 | 0.50 | 0.0082* | 0.25 | 0.086 | 0.00042* |
| 326 | DPF | 1.7 | 1.6 | 0.53 | 0.34 | 0.34 | 0.90 |
| 326 | DPF | 0.70 | 0.50 | 0.40 | 0.11 | 0.050 | 0.082* |
| 333 | DPF | 2.1 | 2.1 | 0.87 | 0.39 | 0.42 | 0.63 |
| 333 | DPF | 1.3 | 0.60 | 0.043* | 0.23 | 0.12 | 0.020* |

DPF = direct promoter fusion project
Survival = proportion of plants in each pot that survived
Drought scale: 6 (highest score) = no stress symptoms, 0 (lowest score; most severe effect) = extreme stress symptoms
*line performed better than control (significant at P < 0.11)

[2085] Discussion. The overexpression of G3518 consistently induced dwarfing and dark green coloration in Arabidopsis. A few severely affected lines died before maturity. Both early and late flowering lines were observed; these phenotypes may be environmentally influenced, since the occurrence of early vs. late flowering lines varied among different batches.

[2086] Several 35S::G3518 lines performed better than wild-type seedlings in germination assays in the presence of NaCl and cold. These same lines also did well in a growth assay under cold conditions, in a C/N sensing assay, and in a soil-based assay. In contrast, several lines performed poorly in a heat growth assay.

[2087] Potential applications. The results obtained to date indicate that constitutive expression of G3518 may be used to confer enhanced tolerance to abiotic stresses such as salt, cold, and nitrogen limitation. Given the developmental off-types associated with overexpression, this gene might need to be optimized by use of alternative promoters.

G3520 (SEQ ID NO: 241 and 242; Glycine max)—Constitutive 35S

[2088] Background. G3520 is a closely-related soy homolog of G1792. The aim of this study was to determine whether overexpression of G3520 confers abiotic stress tolerance and disease resistance similarly to G1792.

[2089] Morphological Observations. G3520 produced severe dwarfing when overexpressed. Almost all of the lines in each of three different batches were very small, slow developing, and exhibited curling/twisting dark, rather shiny leaves. The most severely affected individuals died at early stages. T1 plants were also typically late flowering, and generally exhibited a “strong G1792” phenotype. A total of twenty-eight new lines have been obtained: 321-328, 341-346 and 361-374.

[2090] Disease Summary. In experiments performed thus far, 3 of 8 lines tested were more sensitive to Botrytis than controls. Three separate lines were shown to be more resistant to Botrytis than controls, and 4 of 8 lines (none of which were Botrytis sensitive) were more resistant to Sclerotinia than control plants.

[2091] Physiology (Plate assays) Results. Four our of seven 35S::G3520 lines performed better than wild-type control seedlings in a C/N sensing assay. Two of these lines also did well in a growth assay under low nitrogen and chilling conditions.

[2092] Discussion. G3520 produced severe dwarfing when overexpressed. Almost all of the lines in each of three different batches were very small, slow developing, and exhibited twisted, dark rather shiny leaves. The most severely affected individuals died at early stages.

[2093] Four our of seven 35S::G3520 lines tested performed better than wild-type control seedlings in a C/N sensing assay. No soil drought or disease assays have been performed on these plants to date.

[2094] Potential applications. The results obtained to date indicate that constitutive expression of G3520 may confer enhanced tolerance to abiotic stresses such as nitrogen limitation and greater resistance to disease. However, given the developmental off-types associated with overexpression, the gene would likely need optimization. G3520 might also be applied to control developmental traits such as flowering time, coloration, and wax deposition.

G3737 (SEQ ID NO: 235 and 236; Oryza sativa)—Constitutive 35S

[2095] Background. G3737 is a closely-related rice homolog of G1792. The aim of this study was to determine whether overexpression of G3737 can confer abiotic stress tolerance and disease resistance similar to that induced by G1792.

[2096] Morphological Observations. G3737 produced severe dwarfing when overexpressed. Almost all of the lines in each of two different batches were very small, slow developing, and exhibited curling/twisting dark rather shiny leaves. Plants were typically small, spindly with slightly shiny leaves and were late flowering. At late stages of development, plants were bushy with stems bent at the nodes. Varying degrees of these phenotypes were evident and some lethality was also evident. A total of 35 new lines have been obtained: 301-315 and 321-340.

[2097] Physiology (Plate assays) Results. 35S::G3737 lines were tolerant to several abiotic stress assays. All ten lines were tolerant to cold in a germination assay. Five of these lines were tolerant to NaCl in another germination assay. Tolerance to severe dehydration was also seen in five lines. Three lines also were more tolerant to cold in a chilling growth assay.

[2098] Physiology (Soil Drought-Clay Pot) Summary. Three lines of 35S::G3737 overexpressors were more tolerant in soil-based drought assays than wild-type controls.

TABLE 88
35S::G3737 drought assay results:

| | | Mean | | p-value for | Mean | Mean | p-value for |
|---|---|---|---|---|---|---|---|
| | Project | drought | Mean drought | drought score | survival for | survival for | difference |
| Line | Type | score line | score control | difference | line | control | in survival |
| 304 | DPF | 2.5 | 1.7 | 0.011* | 0.52 | 0.36 | 0.0059* |
| 304 | DPF | 1.2 | 0.50 | 0.034* | 0.29 | 0.10 | 0.000097* |
| 308 | DPF | 2.8 | 1.6 | 0.00041* | 0.56 | 0.37 | 0.0020* |
| 308 | DPF | 1.7 | 0.90 | 0.041* | 0.31 | 0.16 | 0.0037* |
| 309 | DPF | 1.8 | 1.1 | 0.094* | 0.35 | 0.29 | 0.31 |
| 309 | DPF | 2.1 | 1.1 | 0.027* | 0.41 | 0.24 | 0.0016* |

DPF = direct promoter fusion project
Survival = proportion of plants in each pot that survived
Drought scale: 6 (highest score) = no stress symptoms, 0 (lowest score; most severe effect) = extreme stress symptoms
*line performed better than control (significant at P < 0.11)

[2099] Discussion. G3737 produced severe dwarfing when overexpressed. Almost all of the lines were very small, slow developing, and exhibited curling/twisting dark, rather shiny leaves. These phenotypes were similar to those observed upon overexpression of other members of the G1792 clade, but on the severe side.

[2100] 35S::G3737 lines showed enhanced tolerance in several abiotic stress assays. Ten out of ten lines were tolerant to cold in a germination assay. Five of these lines were tolerant to NaCl in another germination assay, and tolerance to severe dehydration was also seen in five lines. Three lines were significantly and consistently more tolerant to drought, and recovered from drought, better than controls.

[2101] Potential applications. The results obtained to date indicate that constitutive expression of G3737 may confer enhanced tolerance to abiotic stresses such as salt, cold, dehydration and drought. The gene might also be used to regulate developmental traits such as flowering time, coloration, and leaf shape. Given the off-types associated with overexpression, G3737 would likely need to be optimized by use of a tissue specific or inducible promoter.

### The G2053 Clade

[2102] G2053 (SEQ ID NO: 329 and 330; Arabidopsis thaliana)—Constitutive 35S

[2103] Background. G2053 was identified in the sequence of BAC T27C4, GenBank accession number AC022287, released by the Arabidopsis Genome Initiative.

[2104] Morphological Observations. A few 35S::G2053 were somewhat small in size, with a number of these overexpressors developing small rosettes and were early flowering. The remainder of the lines were similar to wild type in morphology and development.

[2105] Physiology (Soil Drought-Clay Pot) Summary. The function of G2053 was analyzed using transgenic plants in which the gene was expressed under the control of the 35S promoter. In a root growth assay on media containing high concentrations of PEG, G2053 overexpressors showed more root growth compared to wild-type controls. G2053 overexpressors also were significantly more drought tolerant than wild-type control plants. G2053 overexpressors flowered earlier than wild-type controls.

[2106] Drought assay results. One line of 35S::G2053 overexpressors was significantly more tolerant in soil-based drought assays than wild-type controls in three of four separate plantings.

TABLE 89
35S::G2053 drought assay results:

| | | Mean | | p-value for | Mean | Mean | p-value for |
|---|---|---|---|---|---|---|---|
| | Project | drought | Mean drought | drought score | survival for | survival for | difference in |
| Line | Type | score line | score control | difference | line | control | survival |
| 9 | DPF | 3.8 | 2.0 | 0.0023* | 0.44 | 0.27 | 0.15 |
| 9 | DPF | 1.3 | 1.0 | 0.41 | 0.10 | 0.33 | 0.15 |
| 9 | DPF | 3.9 | 1.2 | 0.00014* | 0.44 | 0.19 | 0.00000098* |
| 9 | DPF | 3.1 | 1.3 | 0.016* | 0.43 | 0.21 | 0.0000052* |

DPF = direct promoter fusion project
Survival = proportion of plants in each pot that survived
Drought scale: 6 (highest score) = no stress symptoms, 0 (lowest score; most severe effect) = extreme stress symptoms
*line performed better than control (significant at P < 0.11)

G516 (SEQ ID NO: 333 and 334; Arabidopsis thaliana)—Constitutive 35S

[2107] Morphological Observations. G516 overexpressors were similar to wild type in morphology and development.

[2108] Physiology Results. The function of G516 was analyzed using transgenic plants in which the gene was expressed under the control of the 35S promoter. G516 overexpressors were less sensitive to ABA than wild-type controls, and were significantly more cold tolerant than wild-type control plants. One line was shown to be more tolerant to drought than controls.

[2109] Potential Applications. G2053 or equivalogs could be used to increase yield, alter a plant's response water deficit conditions, and produce plants with enhanced tolerance to drought, salt stress, and freezing.

### The G2999 Clade

[2110] G2999 (SEQ ID NO: 255 and 256; Arabidopsis thaliana)—Constitutive 35S

[2111] Background. G2999 (AT2G18350) is an Arabidopsis protein from the ZF-HD family. 35S::G2999 lines examined during our earlier genomics screens showed a wild-type morphology and greater NaCl tolerance than controls. Some lines also showed enhanced seedling vigor in the absence of a stress treatment. 35S::G2999 lines performed well in a soil drought screen.

[2112] The aim of this study was to re-assess 35S::G2999 lines and compare its overexpression effects to those of the other ZF-HD proteins. We also sought to test whether use of a two-component overexpression system would produce any strengthening of the phenotype relative to use of a 35S direct promoter-fusion approach.

[2113] Morphological Observations. Additional set of 35S::G2999 lines have now been generated via both a direct promoter fusion and a two-component approach.

[2114] Line Details:

[2115] Lines 301-320 (Direct promoter-fusion): some of the lines were slightly small (#301, 302, 307, 309, 310, 314, 315) and the following lines flowered early: #301, 302, 307, 309-318. In other respects, this set of lines exhibited wild-type morphology.

[2116] Lines 681-700 (2-component): some of these lines were small (#684, 685, 694, 695, 699). In other respects, this set of plants showed wild-type morphology. Accelerated flowering was not observed.

[2117] Physiology (Plate assays) Results. Several of the 35S::G2999 lines (direct promoter fusion; P15277; T2 and T3 lines) lines had less root growth than controls on plates. However, some lines had root hairs that were much longer than control root hairs. Four T3 lines (generated during our earlier genomics program) were more tolerant to cold in a growth assay.

[2118] Subsequently, a set of 35S::G2999 two component lines were examined in a subset of the plate based assays. Four of these lines showed an enhanced performance in a sucrose germination assay. However, these lines were not tested in a cold growth assay.

[2119] Discussion. New sets of 35S::G2999 lines have been obtained using both a direct fusion approach and the two-component system. Both these sets of lines showed some size variation and a number of the lines were small at early stages. A significant number of lines from the direct promoter fusion set flowered early, but this phenotype was not seen in the two-component set, suggesting that it was dependent on there being a particular level of G2999 overexpression, or variables such as growth temperature, which might have differed between the plantings. Stress tolerance phenotypes were seen in plate based assays; the two-component lines showed improved tolerance in a sucrose germination assay, whereas the direct fusion lines showed improved tolerance in a cold growth assay (the two-component lines were not tested in the cold growth assay, but it is unclear at this stage why the direct fusion lines did not show a sucrose tolerance phenotype.) Root phenotypes were also apparent in the direct fusion lines: some lines had less root growth than wild-type, but other lines showed an increase in root hair length.

[2120] The two-component lines have recently been tested in soil drought assays and showed a markedly better performance than controls. Although these two-component lines have not been compared side-by-side with direct fusion lines in the same experiment, the drought phenotype was somewhat stronger in the former.

[2121] Potential applications. Based on the results obtained so far, G2999 could be applied to effect abiotic stress tolerance traits such as drought and cold tolerance. The gene might also be applied to modify traits such as flowering time and root development.

G2999 (SEQ ID NO: 255 and 256; Arabidopsis thaliana)—Leaf RBCS3

[2122] Background. The aim of this study was to assess whether expression of G2999 in photosynthetic tissue, from the RBCS3 promoter, is sufficient to confer stress tolerance.

[2123] Morphological Observations. Twenty-nine RBCS3::G2999 lines have been isolated (541-547, 941-942 and 981-100). Some size variation was apparent in the first two sets of lines, but otherwise, no consistent alterations in morphology were observed.

[2124] Physiology (Plate assays) Results. RBCS3::G2999 lines showed a better performance than controls in germination assays on mannitol (6 of 11 lines), NaCl (3 of 11 lines) and ABA plates (11 of 11 lines).

[2125] Physiology (Soil Drought-Clay Pot) Summary. Two RBCS3::G2999 lines were significantly more tolerant in soil-based drought assays than wild-type controls, on one of the planting dates for each overexpressor.

TABLE 90
RBCS3::G2999 drought assay results:

| | | Mean | | p-value for | Mean | Mean | p-value for |
|---|---|---|---|---|---|---|---|
| | Project | drought | Mean drought | drought score | survival for | survival for | difference in |
| Line | Type | score line | score control | difference | line | control | survival |
| 544 | TCST | 2.1 | 2.0 | 0.65 | 0.36 | 0.33 | 0.47 |
| 544 | TCST | 2.0 | 1.4 | 0.044* | 0.33 | 0.38 | 0.38 |
| 941 | TCST | 2.0 | 1.8 | 0.60 | 0.40 | 0.44 | 0.51 |
| 941 | TCST | 2.0 | 1.2 | 0.0075* | 0.39 | 0.27 | 0.032* |

DPF = direct promoter fusion project
Survival = proportion of plants in each pot that survived
Drought scale: 6 (highest score) = no stress symptoms, 0 (lowest score; most severe effect) = extreme stress symptoms
*line performed better than control (significant at P < 0.11)

[2126] Discussion. We have isolated a set of RBCS3::G2999 lines via a two component approach. Some variation in size was seen among these plants, but overall no consistent alterations in morphology were observed. A number of the plate based assays have been completed, and an enhanced performance was seen relative to controls under osmotic stress (NaCl and mannitol) and on media containing ABA. Two lines showed evidence of greater drought tolerance than controls.

[2127] Potential applications. Based on the data so far, the RBCS3::G2999 combination may be used to confer tolerance to abiotic stresses such as drought and salinity.

G2999 (SEQ ID NO: 255 and 256; Arabidopsis thaliana)—Super Activation (N-GAL4-TA)

[2128] Background. The aim of this project is to determine whether the efficacy of the G2999 protein could be improved by addition of an artificial GAL4 activation domain.

[2129] Morphological Observations. A set of twenty 35S::GAL4-G2999 lines has been obtained. A number of these lines showed a slight acceleration in the onset of flowering, but otherwise the plants appeared wild type.

[2130] Physiological Results. 35S::GAL4-G2999 lines were more tolerant than wild-type controls to salt (3 of 10 lines tested), mannitol (3 of 10 lines), sucrose (5 of 10 lines), germination in heat (4 of 10 lines), severe desiccation (4 of 10 lines), and were less sensitive to ABA than control plants (10 of 10 lines).

[2131] Discussion. 35S::GAL4-G2999 have now been established; these lines showed a marginal acceleration in the onset of flowering.

[2132] Potential applications. The G2999 protein fused to such an activation domain may be used to modify traits such as flowering time. The stress tolerance effects of G2999 can be enhanced by addition of an artificial activation domain, particularly for heat and the hyperosmotic stresses salt, mannitol, sucrose and desiccation.

G2999 (SEQ ID NO: 255 and 256; Arabidopsis thaliana)—Point Mutation

[2133] Background. Overexpression constructs for a pair of different mutagenized forms of G2999 were made to examine the role of particular residues within the G2999 protein, and for purposes of functional optimization.

[2134] The following variants have been made:
[2135] (1) P25737: 35S::G2999(W249G) (targets conserved W residue in homeodomain).
[2136] (2) P25736: 35S::G2999(CHR123-125GLL) (targets conserved CHR residues of the zinc finger domain).

[2137] Morphological Observations. A set of overexpression lines for each of two G2999 variants has now been obtained. In each case, the majority of lines showed a wild-type phenotype.

[2138] Variant (1) Lines 1041-1060 (containing P25737, 35S::G2999(W249G)): 1043, 1044, 1048, 1052, 1058 were small at early stages. #1051, 1053, 1054, 1057, 1060 were slightly early flowering. Otherwise, no consistent effects on morphology were observed.

[2139] Variant (2) Lines 1021-1040 (containing P25736, 35S::G2999(CHR123-125GLL): all appeared wild type except for #1024-1026, 1032, 1038 which were slightly early flowering.

[2140] Physiology (Plate assays) Results. In tests performed thus far, several of the lines harboring mutagenized variants of G2999 were more tolerant, relative to wild-type controls, in plate-based abiotic stress assays. Seven of 10 lines overexpressing site-directed mutation (2) had a higher rate of germination than controls on mannitol, 4/10 on sucrose, 10 of 10 were less sensitive to ABA, and 3 of 10 were more tolerant to desiccation.

[2141] Three of 10 lines overexpressing site-directed mutation (1) had a higher rate of germination than controls on sucrose; the bulk of the remaining assays have not been completed at this time.

[2142] Discussion. We have now obtained a set of overexpression lines for each of the above constructs. In each case, the plants showed no consistent changes in morphology.

[2143] Potential Applications. Lines overexpressing G2999 with particular site-directed mutations are likely to have better quality and greater yield in several types of abiotic stress conditions, including hyperosmotic stresses.

G2991 (SEQ ID NO: 281 and 282; Arabidopsis thaliana)—Constitutive 35S

[2144] Background. G2991 is an Arabidopsis protein from the ZF-HD family and is a closely-related homolog to G2999. 35S::G2991 lines were examined during our earlier genomics screens: these lines showed reduced size in some cases, but otherwise has wild-type morphology. A wild-type phenotype was obtained in stress assays.

[2145] Morphological Observations. Three new sets of 35S::G2991 lines have been obtained: 301-302, 321-323, 341-360. Many of these lines were reduced in size to various extents. Four out of ten 35S:G2991 lines had more root growth and root hairs on control plates compared to wild-type seedlings.

[2146] Discussion. New sets of 35S::G2991 lines have been obtained; as in the genomics screens, some size variation was apparent but there were no consistent alterations in morphology. In plate based assays, no effects on stress tolerance were seen, but many of the lines showed enhanced root growth compared to controls and exhibited an increase in root hair density.

[2147] Potential applications. Based on the results obtained so far, G2991 could be applied to enhance root development, which might improve traits such as drought tolerance and nitrogen use efficiency.

G2989 (SEQ ID NO: 279 and 280; Arabidopsis thaliana)—Constitutive 35S

[2148] Background. G2989 is an Arabidopsis protein from the ZF-HD family and is a closely-related homolog to G2999. 35S::G2989 lines were examined during our earlier genomics screens: some of the lines showed an early flowering phenotype, but otherwise, a wild-type response was observed in all assays performed.

[2149] Morphological Observations. Two new sets of 35S::G2989 direct promoter fusion lines have been generated: #301-320 and #321-340. Some size variation was noted in these sets of lines at early stages, but overall, no consistent differences to wild-type were apparent. However, 2/20 lines from the second set of plants (T1-327 and T1-335) showed accelerated flowering.

[2150] Physiology (Plate assays) Results. Six out of ten 35S::G2989 lines were more tolerant to a severe dehydration stress compared with wild-type control seedlings. Five of ten lines were also more tolerant to cold conditions in a growth assay.

[2151] Physiology (Soil Drought-Clay Pot) Summary. Three lines of 35S::G2989 overexpressors performed better than controls in drought and/or drought recovery assays.

TABLE 91
35S::G2989 drought assay results:

| | | Mean | Mean | p-value for | Mean | | p-value for |
|---|---|---|---|---|---|---|---|
| | Project | drought | drought score | drought score | survival for | Mean survival | difference in |
| Line | Type | score line | control | difference | line | for control | survival |
| 302 | DPF | 0.67 | 1.0 | 1.0 | 0.12 | 0.17 | 0.30 |
| 302 | DPF | 1.3 | 1.2 | 0.79 | 0.26 | 0.25 | 0.78 |
| 302 | DPF | 1.8 | 1.2 | 0.028* | 0.29 | 0.25 | 0.27 |
| 311 | DPF | 1.7 | 1.0 | 0.41 | 0.29 | 0.17 | 0.055* |
| 318 | DPF | 2.2 | 1.5 | 0.0082* | 0.40 | 0.30 | 0.032* |
| 318 | DPF | 1.6 | 0.70 | 0.048* | 0.31 | 0.17 | 0.0059* |

DPF = direct promoter fusion project
Survival = proportion of plants in each pot that survived
Drought scale: 6 (highest score) = no stress symptoms, 0 (lowest score; most severe effect) = extreme stress symptoms
*line performed better than control (significant at P < 0.11)

[2152] Discussion. Two new sets of 35S::G2989 lines have been obtained. These lines showed a wild-type morphology except for a small number of individuals that flowered early. However, stress tolerance was shown by a substantial number of lines in both plate-based severe dehydration and cold growth assays. One of three lines tested also showed a better performance than wild-type in a single run of the soil drought clay pot assay. It is noteworthy that the highly related gene, G2990 also gave cold and drought tolerance when overexpressed, indicating that these two proteins have equivalent activities.

[2153] Potential applications. Based on the results obtained so far, G2989 could be applied to effect abiotic stress tolerance traits such as drought and cold tolerance.

G2990 (SEQ ID NO: 283 and 284; Arabidopsis thaliana)—Constitutive 35S

[2154] Background. G2990 is an Arabidopsis protein from the ZF-HD family and is a closely-related homolog to G2999. 35S::G2990 lines were examined during our earlier genomics screens: these lines showed wild-type morphology, showed increased sensitivity to low N in plate based assays.

[2155] Morphological Observations. Most of a set of twenty 35S::G2990 T1 lines (#301-320) showed no consistent alterations in morphology. Some size variation was apparent and a number of lines (310, 312, 314) were slightly dark in coloration.

[2156] Physiology (Plate assays) Results. Five out of ten lines were insensitive to ABA in a germination assay. Three out of ten lines were more tolerant to cold conditions in a growth assay. A number of lines showed less extensive root development than controls when grown on plates without a stress treatment.

[2157] Physiology (Soil Drought-Clay Pot) Summary. Three independent lines have been tested in a single ran of the soil drought assay. Two of these lines performed significantly better than wild-type controls.

TABLE 92
35S::G2990 drought assay results:

| | | Mean | Mean | p-value for | Mean | Mean | p-value for |
|---|---|---|---|---|---|---|---|
| | Project | drought | drought | drought score | survival for | survival for | difference in |
| Line | Type | score line | score control | difference | line | control | survival |
| 312 | DPF | 2.8 | 0.44 | 0.0021* | 0.42 | 0.095 | 0.00000071* |
| 313 | DPF | 1.8 | 0.44 | 0.038* | 0.40 | 0.095 | 0.0000040* |

DPF = direct promoter fusion project
Survival = proportion of plants in each pot that survived
Drought scale: 6 (highest score) = no stress symptoms, 0 (lowest score; most severe effect) = extreme stress symptoms
*line performed better than control (significant at P < 0.11)

[2158] Discussion. A new set of 35S::G2990 lines has been obtained. These lines showed no consistent alterations in morphology. However, stress tolerance was shown by a substantial number of lines in both plate-based ABA and cold growth assays. However, some of the lines showed reduced root development compared to wild-type when grown on agar plates in the absence of stress treatments. Two of three lines tested also showed a better performance than wild-type in a single run of the soil drought clay pot assay. It is noteworthy that the highly related gene, G2989 also gave cold and drought tolerance when overexpressed, indicating that these two proteins have equivalent activities.

[2159] Potential applications. Based on the results obtained so far, G2990 could be applied to effect abiotic stress tolerance traits such as drought and cold tolerance.

G3000 (SEQ ID NO: 259 and 260; Arabidopsis thaliana)—Constitutive 35S

[2160] Background. G3000 is an Arabidopsis protein from the ZF-HD family and is a closely-related homolog to G2999.

[2161] Morphological Observations. Twenty 35S::G3000 T1 lines have been selected: at early stages, considerable size variation was apparent among these lines and a significant number (#302, 305, 311, 312, 314, 318) were distinctly early flowering. Some of the lines also showed floral abnormalities.

[2162] Discussion. A new sets of 35S::G3000 lines have been obtained; many of the lines were early flowering and were reduced in size at early stages. These lines have been tested in plate based assays and showed a wild-type response.

[2163] Potential applications. Based on the results obtained so far, G3000 could be applied to manipulate developmental traits such as flowering time.

G3676 (SEQ ID NO: 265 and 266; Zea mays)—Constitutive 35S

[2164] Background. G3676 is a ZF-HD family gene from maize and is a closely-related homolog to G2999. We are testing whether example ZF-HD genes from a number of different species, can confer drought tolerance in a comparable manner to G2999.

[2165] Morphological Observations. Overexpression of G3676 in Arabidopsis produced alterations in flowering time and a reduction in plant size.

[2166] Line Details: T1 Lines 301-320: #305, 306, 308, 312, 313, 317, 319, 320 were small. #307, 311, 318 died at early stages. Lines 301-304, 308-310, 312, 314-316, 320 flowered early. Lines 305, 306, 313, 319 were slow developing and flowered slightly late. The remaining lines appeared wild type.

[2167] Physiology (Plate assays) Results. Six of ten 35S::G3676 lines had very good tolerance towards NaCl in a germination assay. Four lines also had very good tolerance towards severe dehydration in a plate assay.

[2168] Discussion. Overexpression of G3676 produced a reduction in overall size and accelerated flowering in many of the lines. 35S::G3676 lines showed an enhanced performance versus wild type in NaCl germination assays and in a severe dehydration assay.

[2169] Potential applications. Based on the results so far, G3676 may be used to confer tolerance to abiotic stresses such as salinity and drought. The gene might also be used to regulate developmental traits such as flowering time.

G3681 (SEQ ID NO: 277 and 278; Zea mays)—Constitutive 35S

[2170] Background. G3681 is a ZF-HD family gene from maize and is a closely-related homolog to G2999. We are testing whether example ZF-HD genes from a number of different species, can confer drought tolerance in a comparable manner to G2999.

[2171] Morphological Observations. Overexpression of G3681 in Arabidopsis produced alterations in flowering time and a reduction in plant size. Some of the overexpression lines also exhibited a wrinkled silique phenotype.

[2172] Line Details:

[2173] T1 Lines 301-320: #302, 304, 306, 307, 308, 309, 312, 313, 314, 316 were small. #305, 315, 317 perished at early stages. #301, 306, 310, 311, 318, 319 flowered early. #301, 306, 318, 319 had wrinkled siliques.

[2174] T1 lines 321-340: 325, 326, 327, 328, 329, 331, 333-336, 340 were small, late developing, and dark in coloration. The following lines flowered early: 321, 322, 324, 331, 332, 334, 337-339. All except 324, 327, 332, 339 had slightly wrinkled siliques.

[2175] Physiology (Plate assays) Results. Five out of ten 35S::G3681 lines were more tolerant to NaCl in a germination assay.

[2176] Discussion. Overexpression of G3681 produced a reduction in overall size and accelerated flowering in many of the lines. Many of the lines also showed abnormal silique development and had somewhat wrinkled siliques. 35S::G3681 lines showed an enhanced performance versus wild type in an NaCl germination assay on plates.

[2177] Potential applications. G3681 may be used to confer tolerance to abiotic stresses such as salinity. The gene might also be used to regulate developmental traits such as flowering time and fruit development.

G3686 (SEQ ID NO: 267 and 268; Oryza sativa)—Constitutive 35S

[2178] Background. G3686 is a ZF-HD family gene from rice and is a closely-related homolog to G2999. We are testing whether example ZF-HD genes from a number of different species, can confer drought tolerance in a comparable manner to G2999.

[2179] Morphological Observations. All of the 35S::G3686 T1 lines (301-320) showed a mild early flowering phenotype. A number of the lines were also markedly small (#301, 303, 305, 306, 308, 310, 312, 314, 315, 316, 318, 319), but in other respects, this set of plants exhibited wild-type morphology.

[2180] Physiology (Plate assays) Results. Three out of ten 35S::G3686 lines were more tolerant to cold conditions in a germination assay. Seedlings contained less anthocyanins and were larger than wild-type seedlings.

[2181] Physiology (Soil Drought-Clay Pot) Summary. Three independent lines have been tested in soil drought assays and each line performed significantly better than wild-type controls.

TABLE 93
35S::G3686 drought assay results:

| | | Mean | Mean | p-value for | Mean | Mean | p-value for |
|---|---|---|---|---|---|---|---|
| | Project | drought | drought score | drought score | survival for | survival for | difference in |
| Line | Type | score line | control | difference | line | control | survival |
| 303 | DPF | 2.2 | 1.1 | 0.0099* | 0.44 | 0.30 | 0.014* |
| 303 | DPF | 2.0 | 1.3 | 0.022* | 0.41 | 0.39 | 0.63 |
| 306 | DPF | 2.3 | 1.6 | 0.011* | 0.56 | 0.42 | 0.024* |
| 306 | DPF | 2.2 | 1.2 | 0.031* | 0.42 | 0.33 | 0.11 |
| 309 | DPF | 2.1 | 1.3 | 0.023* | 0.51 | 0.31 | 0.00060* |
| 309 | DPF | 1.7 | 0.90 | 0.10* | 0.25 | 0.14 | 0.017* |

DPF = direct promoter fusion project
Surival = proportion of plants in each pot that survived
Drought scale: 6 (highest score) = no stress symptoms, 0 (lowest score; most severe effect) = extreme stress symptoms
*line performed better than control (significant at P < 0.11)

[2182] Discussion. Overexpression of G3686 produced deleterious effects in Arabidopsis; 35S::G3686 lines were slightly early flowering and many of the lines were smaller than controls. In plate based germination assays, enhanced tolerance to cold was observed in these lines. Three lines were significantly and consistently more tolerant to drought than controls.

[2183] Potential applications. Based on the data obtained so far, G3686 may be used to modify developmental traits such as flowering time and abiotic stress related traits such as cold and drought tolerance.

### The G3086 Clade

[2184] G3086 (SEQ ID NO: 291 and 292; Arabidopsis thaliana)—Constitutive 35S

[2185] Background. G3086 was included in the drought program because it showed good tolerance towards heat and salt stress in the abiotic stress assays. The gene is also abiotic stress responsive based on transcript profiling experiments indicating that it could have an endogenous function in such stress responses. The aim of this study was to re-assess 35S::G3086 lines and compare the overexpression effects with those of its closely-related homologs.

[2186] Morphological Observations. Twelve new 35S::G3086 direct fusion lines (301-320) and twenty-five new 35S::G3086 two-component lines (321-326 and 381-399) were isolated. The majority of lines were dwarfed and showed accelerated flowering.

[2187] Direct fusion lines: Line 306 died early in development. All other lines were small, spindly and early flowering.

[2188] Two-component lines (321-326): Line 321 was small, spindly and early flowering—similar to the direct fusion lines. Line 325 died early in development. Lines 322, 323 and 324 were small, dark green and late flowering. Line 326 was largely wild type in appearance.

[2189] Two-component lines (381-399): All lines (except line 384) were small, compared to controls, early in development. Lines 382, 384, 390, 392, 393 and 394 were small, spindly and early developing vs. control. All other lines were not significantly different from control plants.

[2190] Physiology (Plate assays) Results. Two generations (T2 and T3) of 35S::G3086 direct fusion lines have been tested in abiotic stress assays.

[2191] Severe dehydration tolerance was observed in 4 of 10 direct promoter fusion lines. Three out of 10 direct promoter fusion lines tested also showed a better performance than controls under cold growth conditions. Using a two-component expression system, 3 of 12 overexpressing lines were more tolerant to mannitol.

[2192] Discussion. New sets of 35S::G3086 plants have been obtained by both a direct promoter fusion and a two-component approach. Both sets of lines displayed early flowering and significant dwarfing. In plate based assays, a few lines were tolerant to severe dehydration and cold stress during seedling growth. While a few lines also were tolerant to heat and salt stress in plate based assays, the magnitude of the stress tolerance was not as great as that seen during the original genomics program. Because of the dwarfing observed, the lines submitted for abiotic stress assays may have had a weaker phenotype than those originally isolated during the genomics program. Some evidence of drought tolerance has been obtained in soil assays, but the data presented here were obtained with the original lines from the genomics program.

[2193] Potential applications. At this stage of the analysis, it appears that G3086 may be useful for creating tolerance to abiotic stress such as hyperosmotic stress (e.g., drought) and cold in crops. It is possible that constitutive expression of G3086 might also be useful for modifying developmental traits such as flowering time and plant size.

G3086 (SEQ ID NO: 291 and 292; Arabidopsis thaliana)—Knockout (KO)

[2194] Background. It would be useful to characterize a knockout mutant of G3086 in order to assign a role to the endogenous G3086 locus, and would help determine whether the gene has a native function in growth or regulation of stress responses.

[2195] Morphological Observations. A G3086 T-DNA insertion line derived from the SALK collection, SALK_{—}049022, was obtained from the ABRC at Ohio State University (NCBI acc. no. CC05386, version CC053826.1; GI:29473490; SALK_{—}049022.30.00.x Arabidopsis thaliana TDNA insertion lines Arabidopsis thaliana genomic clone SALK_{—}049022.30.00.x, genomic survey sequence). BLAST analysis of the sequence from the insertion point deposited in GenBank by SALK indicates that the T-DNA in this line is integrated approximately 143 bp downstream of the G3086 start codon.

[2196] We identified 1 homozygous plant (lines 10), by PCR genotyping, among eleven individuals germinated from the seed lot supplied by the ABRC. Selfed seed was collected from the homozygous plant and a batch of 6 progeny were grown from line 10 and examined under 24-hour light conditions. These plants showed a moderate delay in flowering compared to wild-type controls.

[2197] Discussion. We have isolated a homozygous population for a T-DNA insertion allele of G3086 from the SALK collection. Interestingly, these plants showed delayed flowering, a converse phenotype to that seen in the overexpression lines. Such effects indicate that G3086 could have an endogenous role in regulation of the floral transition.

[2198] Potential applications. The morphological data obtained from the KO.G3086 line support our conclusions that G3086 can be a useful transcription factor for manipulating flowering time. In particular, a knock-down approach on this gene or its homologs might have utility in delaying the onset of flowering.

G3086 (SEQ ID NO: 291 and 292; Arabidopsis thaliana)—Root-Specific RSI1

[2199] Background. G3086 was included in the drought program because it showed good tolerance towards heat and salt stress in the abiotic stress assays performed during the genomics program. The gene is also abiotic stress responsive (based on transcript profiling experiments) indicating that it could have an endogenous function in such stress responses. The aim of this study was to determine whether the morphological (such as early flowering and dwarfing) and stress tolerance effects of G3086 overexpression could be separated through root-specific expression with the RSI1 promoter.

[2200] Morphological Observations. Twenty RSI1::G3086 lines have been planted (301-320). Nine lines showed no differences to control plants. However, a significant number of lines ( 8/20) were early flowering and had slightly flat leaves (805, 807, 809, 811, 812, 815, 817 and 818). A single line, #816 had a rather dark shiny appearance. Severe dwarfing was not seen in any of the lines, and at later stages they appeared wild type.

[2201] Discussion. A significant number of RSI1::G3068 plants were early flowering compared to wild-type control seedlings in morphological assays. However, the lines were of wild-type size. Thus, the severe dwarfing observed in 35S::G3086 lines have been eliminated using root-specific expression. The result is interesting, though, as it indicates that G3086 activity in the root might constitute a developmental signal that triggers the onset of flowering.

[2202] Potential applications. The RSI1::G3086 combination may be useful for manipulating flowering time without conferring deleterious morphological or developmental effects.

G3086 (SEQ ID NO: 291 and 292; Arabidopsis thaliana)—Emergent Leaf Primordia-Specific AS1

[2203] Background. The aim of this study was to determine whether the morphological (such as early flowering and dwarfing) and stress tolerance effects of G3086 overexpression could be separated through Emergent leaf primordia-specific expression with the AS1 promoter.

[2204] Morphological Observations and Discussion. AS1::G3086 plants were slightly small and some T1 lines flowered marginally earlier than wild-type control plants in morphological assays. These phenotypes were not as penetrant as in 35S::G3086 lines, and it therefore appears that expression from the AS1 promoter does not produce many of the deleterious effects of G3086 expression.

[2205] Potential applications. The AS1::G3086 combination may be useful for manipulating flowering time without conferring deleterious morphological or developmental effects.

G3086 (SEQ ID NO: 291 and 292; Arabidopsis thaliana)—Double Overexpression

[2206] Background. The aim of this double overexpression project is to determine whether different transcription factor genes will give an additive effect on drought/disease/low N tolerance when “stacked” together in the same line.

[2207] Morphological Observations.

[2208] 35S::G481 line 3 (female)×35S::G3086 line 8 (male). Twenty F1 plants were obtained. All showed an identical phenotype to the 35S::G3086 parental line: very early flowering, reduced size, and spindly inflorescences.

[2209] 35S::G1073 line 4 (male)×35S::G3086 line 8 (female). Eleven F1 plants were obtained. All F1 plants showed an intermediate leaf phenotype, but were earlier flowering than wild-type. Thus, the accelerated flowering produced by G3086 overexpression appears epistatic to the delayed flowering associated with G1073 overexpression. The double overexpressing plants had broader leaves than the 35S::G3086 parental line, but the leaves were smaller than in wild-type and the 35S::G1073 parental line.

[2210] Discussion. A 35S::G481;35S::G3086 line has been made by crossing. F1 plants have recently been obtained, and these all showed a 35S::G3086-like morphology; the plants were very early flowering.

[2211] A cross has also been made to create a 35S::G3086;35S::G1073 line. The aim of this combination was to determine whether the accelerated flowering seen in 35S::G3086 lines would compensate for the delayed flowering seen in some of the 35S::G1073 lines. We have now obtained F1 plants from the cross; these plants flowered earlier than wild-type, demonstrating that overexpression of G3086 can overcome the delay in flowering that results from G1073 overexpression. The leaves of the double overexpression line were broader and rounder than those of the 35S::G3086 parental line, but were smaller than those of wild-type and the 35S::G1073 parental line.

[2212] Potential applications. The 35S::G3086;35S::G1073 and 35S::G3086;35S::G481 combinations indicate that a stacking approach might offer advantages over use of the 35S::G1073 or the 35S::G481 transgenes alone. For example, both 35S::G1073 and 35S::G481 in soybean produce a delayed flowering off-type which is associated with a yield penalty (field trial results). Combining G1073 or G481 with G3086 overexpression in the same soy line may afford drought tolerance without the delayed flowering caused by G1073 or G481.

G2555 (SEQ ID NO: 317 and 318; Arabidopsis thaliana)—Constitutive 35S

[2213] Background. G2555 was included in the drought program because it is an Arabidopsis sequence related to G3086. Previously, during our earlier genomics screen we found that 35S::G2555 lines exhibited accelerated flowering, constitutive photomorphogenesis and increased sensitivity to Botrytis. The aim of this study was to re-assess 35S::G2555 lines and compare the overexpression effects with those of its homologs.

[2214] Morphological Observations. Thirty-two 35S::G2555 lines have been isolated (301-312 and 341-360).

[2215] Lines 301-312: Line 302 died early in development. All other lines were slightly small, spindly and early flowering (except 301, 305 and 312). Line 312 was dark green with high anthocyanin in the vasculature and secondary shoots.

[2216] Lines 341-360: Initially lines 346, 347, 349, 356, 357 and 360 were early developing with small rosettes. Later, all lines were somewhat small and spindly.

[2217] Physiology (Plate assays) Results. Nine out of ten 35S::G2555 lines were more tolerant to heat in a growth assay. Three of these lines were also more tolerant to cold in another growth assay. In the latter assay, the seedlings were slightly larger and contained less anthocyanin.

[2218] Discussion. 35S::G2555 lines were slightly small and showed a marked acceleration of flowering, confirming the results of our genomics screens. Heat tolerance was observed in nine 35S::G2555 lines and cold tolerance was also observed in three lines.

[2219] Importantly, we found that 35S::G2555 tomato lines grown during the trials funded by an ATP grant (performed in the summer of 2004) showed more rapid growth and increased biomass and vigor compared to controls under hot, dry field conditions.

[2220] Potential applications. The results of these overexpression studies confirm that G2555 could be a good candidate gene for improvement of abiotic stress tolerance (such as drought, heat, and cold) in commercial species. The gene might also be applied to improve vigor and manipulate the onset of flowering. It should be pointed out that the disease susceptibility that we detected in 35S::G2555 lines is of potential concern. Further experimentation will be needed to determine how the increased drought tolerance is related to this off-type.

G3750 (SEQ ID NO: 325 and 326; Oryza sativa)—Constitutive 35S

[2221] Background. G3750 was included in the drought program because it is a closely-related rice homolog of G3086. The aim of this study was to assess 35S::G3750 lines and compare the overexpression effects with those of the other genes from the G3086 study.

[2222] Morphological Observations. Twenty 35S::G3750 lines have been isolated (301-320). A large amount of size variation was seen in this set of T1 plants and many of the lines were noted to be slightly early flowering: #301, 304, 305, 309, 314, 315, 316, 317, 318, 319. Many of the lines were small.

[2223] Physiology (Plate assays) Results. 35S::G3750 lines showed a significantly better performance than wild type in an ABA germination assay (7 of 10 lines), the severe dehydration assay (9 of 10 lines), and the heat growth assay (6 of 10 lines).

[2224] Discussion. 35S::G3750 plants were small compared to wild-type control seedlings and a number of lines were noted to be slightly early flowering. 35S::G3750 lines showed a good performance in plate based ABA germination, severe dehydration and heat growth assays. These phenotypes are comparable to those produced by G3086 overexpression, indicating that the G3750 and G3086 proteins have similar activities.

[2225] Potential applications. Based on available results, G3750 is an excellent candidate for producing tolerance to abiotic stress in crops. The gene could also be used to modify traits such as flowering time.

G3760 (SEQ ID NO: 323 and 324; Zea mays)—Constitutive 35S

[2226] Background. G3760 was included in the drought program because it is a closely-related maize homolog of G3086. The aim of this study was to assess 35S::G3760 lines and compare the overexpression effects with those of its homologs.

[2227] Morphological Observations. Twenty 35S::G3760 lines have been isolated (301-320); the majority of these showed a marked acceleration in the onset of flowering and were distinctly small and rather pale in coloration.

[2228] Details:

[2229] Lines 303, 309, 317 and 320 died early in development. Lines 308, 312 and 313 had abnormal phyllotaxy and were small (50%) in size. All others were pale and generally very small. Lines 304, 306, 307, 310 and 315 had slightly wrinkled, short, broad siliques vs. control plants. In general, the lines flowered early, although the degree of early flowering varied.

[2230] Physiology (Plate assays) Results. Four of 10 35S::G3760 lines were more tolerant to salt than wild-type controls. Five of 10 overexpressing lines were more tolerant to germination in cold conditions than wild type. Five of 10 lines were also less sensitive or insensitive to ABA (as compared to ABA-sensitive wild-type controls).

[2231] Discussion. 35S::G3760 lines were markedly early flowering, pale in coloration, small and showed growth abnormalities such as deformed siliques. Positive results were observed in plate assays: 35S::G3760 lines were tolerant to NaCl, ABA and cold in germination assays. Similar phenotypes are seen in 35S::G3086 lines indicating that G3086 and G3760 have comparable activities.

[2232] Potential applications. The results of these overexpression studies confirm that G3760 could be a good candidate gene for improvement of drought related stress tolerance in commercial species. However, the decrease in size, paleness, and early flowering seen in some of the lines suggests that the gene might require optimization by use of different promoters or protein modifications, prior to product development. The gene might also be useful for regulation of developmental traits like flowering time.

[2233] G3765 (SEQ ID NO: 313 and 314; Glycine max)—Constitutive 35S

[2234] Background. G3765 was included in the drought program because is a closely-related soybean homolog of G3086. The aim of this project was to assess 35S::G3765 lines and compare the overexpression effects with those of other genes from the G3086 study.

[2235] Morphological Observations. Twenty 35S::G3765 lines were isolated (301-320). Considerable size variation was apparent and many of the lines were somewhat small, particularly at early stages. Lines 301, 302, 303 and 315 appeared wild type. Three lines (301, 314 and 315) were early developing compared to control plants

[2236] Physiology (Plate assays) Results. Four out of ten 35S::G3765 lines were more insensitive to ABA than control seedlings.

[2237] Physiology (Soil Drought-Clay Pot) Summary. Two lines performed significantly better than CBF4-overexpressing (OEX) control plants (these controls are more drought tolerant than wild-type).

TABLE 94
35S::G3765 drought assay results:

| | | | | Mean | | | | |
|---|---|---|---|---|---|---|---|---|
| | | | Mean | drought | p-value for | Mean | Mean | p-value for |
| | Project | | drought | score | drought score | survival | survival for | difference in |
| Line | Type | Control | score line | control | difference | for line | control | surival |
| 302 | DPF | G912 OEX | 2.3 | 1.2 | 0.066* | 0.47 | 0.24 | 0.000083* |
| 302 | DPF | G912 OEX | 0.70 | 0.50 | 0.55 | 0.17 | 0.086 | 0.035* |
| 305 | DPF | G912 OEX | 3.7 | 1.7 | 0.0073* | 0.75 | 0.26 | 0.0000000016* |

DPF = direct promoter fusion project
Survival = proportion of plants in each pot that survived
Drought scale: 6 (highest score) = no stress symptoms, 0 (lowest score; most severe effect) = extreme stress symptoms
*line performed better than control (significant at P < 0.11)

Discussion: Overall, 35S::G3765 lines were not consistently different from wild-type plants in morphological assays, except for some variation in overall size. A slight acceleration in flowering time was seen in a small number of lines, but this phenotype needs to be confirmed. Insensitivity to ABA was also noted in four lines during plate based assays. Two lines showed significant drought tolerance relative to controls.

[2238] Potential applications: Based on the results from plate assays, G3765 might be used to confer abiotic stress tolerance, including drought tolerance.

G3766 (SEQ ID NO: 303 and 304; Glycine max)—Constitutive 35S

[2239] Background. G3766 was included in the drought program because is a closely-related soybean homolog of G3086. The aim of this project was to assess 35S::G3766 lines and compare the overexpression effects with those of other genes from the G3086 study.

[2240] Morphological Observations. Twenty 35S::G3766 lines were isolated (301-320); a significant number of lines showed accelerated flowering (301, 302, 305, 307, 308, 309, 310, 312, 314, 315 and 317) but otherwise, apart from some size variation, the lines generally appeared wild type.

[2241] Physiology (Plate assays) Results. Seven of 10 35S::G3760 lines were more tolerant to severe dehydration assays than wild-type controls. Three of 10 overexpressing lines were more tolerant to germination in cold conditions than wild type. Seven of 10 lines were also less sensitive or insensitive to ABA (as compared to ABA-sensitive wild-type controls).

[2242] Discussion. Overexpression of G3766 accelerated flowering in Arabidopsis. In other respects, though, the lines appeared wild type. Given that G3086 also accelerates the onset of flowering when overexpressed, the two proteins may have similar activities.

[2243] Potential applications. G3766 can be used to manipulate developmental traits such as flowering time, and confer cold and hyperosmotic stress (e.g., salt) tolerance to plants.

G3767 (SEQ ID NO: 297 and 298; Glycine max)—Constitutive 35S

[2244] Background. G3767 was included in the drought program because it is a closely-related soybean homolog of G3086. The aim of this study was to assess 35S::G3767 lines and compare the overexpression effects with those of other G3086 related genes.

[2245] Morphological Observations. Twenty-seven 35S::G3767 lines were isolated (301-317 and 321-330). G3767 overexpression induced slightly early flowering in most lines. Most lines were also somewhat smaller than controls, although line 330 was wild-type sized, and 317 was larger than controls. Lines 315, 329 and 330 were markedly early flowering. A small number of lines (301, 324 and 325) were slightly late developing.

[2246] Physiology (Plate assays) Results. Three out of ten 35S::G3767 lines were more tolerant than wild-type seedlings in a severe dehydration based assay. Three of ten G3767 overexpressing lines were less sensitive to ABA than wild type. Five 35S::G3767 lines had more root growth compared to wild-type seedlings in a root growth assay.

[2247] Discussion. The majority of 35S::G3767 plants were slightly early flowering, but otherwise appeared wild type. A number of 35S::G3767 lines were more stress tolerant than controls based on results from a severe plate based dehydration assay. Some lines also had more root growth in plate grown conditions.

[2248] Potential applications. The results of these overexpression studies confirm that G3767 could be a candidate gene for improvement of drought related stress tolerance in commercial species. Additionally, the gene may be used to manipulate developmental traits such as flowering time and root structure.

G3768 (SEQ ID NO: 293 and 294; Glycine max)—Constitutive 35S

[2249] Background. G3768 was included in the drought program because it is a closely-related soybean homolog of G3086. The aim of this study was to assess 35S::G3768 lines and compare the overexpression effects with those of other G3086 related genes.

[2250] Morphological Observations. Thirty 35S::G3768 lines have been isolated (301-314 and 321-336).

[2251] Lines 301-314: All lines were early flowering compared to controls. Line 306 was larger than controls and line 311 was small. No other differences between G3768 overexpression lines and controls were evident.

[2252] Lines 321-336: The sizes and flowering times in this batch of plants were more variable, including the controls. Overall, however, the trend was again towards early flowering and no other consistent differences.

[2253] Physiology (Plate assays) Results. Five of ten G3768 overexpressing lines were less sensitive to ABA than wild-type controls.

[2254] Discussion. 35S::G3768 lines were early flowering, a comparable effect to that seen on G3086 overexpression. However, when these lines were tested in plate based assays, a wild-type response was observed under all conditions.

[2255] Potential applications. Based on the data so far, G3768 may be used to regulate the floral transition and to confer abiotic stress tolerance to plants, including commercial species.

G3769 (SEQ ID NO: 295 and 296; Glycine max)—Constitutive 35S

[2256] Background. G3769 is a closely-related soybean homolog of G3086. The aim of this study was to assess 35S::G3769 lines and compare the overexpression effects with those of other G3086 related genes.

[2257] Morphological Observations. Eighteen 35S::G3769 lines were isolated (301-318). Fourteen lines were early flowering. In other respects, these lines showed wild-type morphology.

[2258] Physiology (Plate assays) Results. Three of ten 35S::G3769 overexpressing lines were less sensitive to ABA than wild-type controls, and 6 of 10 overexpressing lines were more tolerant to severe desiccation than wild-type controls.

[2259] Discussion. 35S::G3769 lines were early flowering, a comparable effect to that seen on G3086 overexpression.

[2260] Potential applications. Based on the data so far, G3769 may be used to regulate the floral transition and to confer drought and/or other abiotic stress tolerance to plants, including commercial species.

G3771 (SEQ ID NO: 311 and 312; Glycine max)—Constitutive 35S

[2261] Background. G3771 is a closely-related soybean homolog of G3086. The aim of this study was to assess 35S::G3771 lines and compare the overexpression effects with those of its homologs.

[2262] Morphological Observations. Twenty-four 35S::G3771 lines were isolated (321-324 and 341-360). Over three-quarters of the lines were early-flowering, slightly pale, and all lines were dwarfed to varying extents. Some of the lines had floral defects and produced deformed siliques (#344, 347, 349, 350 and 359).

[2263] Physiology (Plate assays) Results. Seven of 10 overexpressing lines were more tolerant to severe desiccation in plate-based assays than wild-type controls.

[2264] Physiology (Soil Drought-Clay Pot) Summary. Three lines performed significantly better than CBF4-overexpressing (OEX) control plants (these controls are more drought tolerant than wild-type).

TABLE 95
35S::G3771 drought assay results:

| | | | Mean | Mean | p-value for | Mean | Mean | p-value for |
|---|---|---|---|---|---|---|---|---|
| | Project | | drought | drought | drought score | survival | survival for | difference in |
| Line | Type | Control | score line | score | difference | for line | control | survival |
| 323 | DPF | CBF4 | 1.8 | 1.6 | 0.60 | 0.41 | 0.31 | 0.083* |
| | | OEX | | | | | | |
| 323 | DPF | CBF4 | 0.70 | 0.70 | 0.83n | 0.11 | 0.14 | 0.59 |
| | | OEX | | | | | | |
| 344 | DPF | CBF4 | 1.3 | 0.80 | 0.13 | 0.17 | 0.14 | 0.51 |
| | | OEX | | | | | | |
| 344 | | CBF4 | 2.2 | 0.90 | 0.0040* | 0.47 | 0.29 | 0.0028* |
| | | OEX | | | | | | |
| 347 | | CBF4 | 1.3 | 0.90 | 0.20 | 0.16 | 0.11 | 0.23 |
| | | OEX | | | | | | |
| 347 | | CBF4 | 1.9 | 0.90 | 0.033* | 0.39 | 0.18 | 0.00014* |
| | | OEX | | | | | | |

DPF = direct promoter fusion project
Survival = proportion of plants in each pot that survived
Drought scale: 6 (highest score) = no stress symptoms, 0 (lowest score; most severe effect) = extreme stress symptoms
*line performed better than control (significant at P < 0.11)

[2265] Discussion. Overexpression of G3771 caused accelerated flowering and dwarfing in a comparable manner to the overexpression of G3086. Three lines were more drought tolerant than control plants.

[2266] Potential applications. Based on the data so far, G3771 may be used to regulate the floral transition and confer drought tolerance in plants, including commercial species.

### Example XIV

### Transformation of Dicots to Produce Increased Biomass, Disease Resistance or Abiotic Stress Tolerance

[2267] Crop species including tomato and soybean plants that overexpress any of a considerable number of the transcription factor polypeptides of the invention have been shown experimentally to produce plants with increased drought tolerance and/or biomass in field trials. For example, tomato plants overexpressing the G2153 polypeptide have been found to be larger than wild-type control tomato plants. For example, soy plants overexpressing a number of G481, G682, G867 and G1073 orthologs have been shown to be more drought tolerant than control plants. These observations indicate that these genes, when overexpressed, will result in larger yields than non-transformed plants in both stressed and non-stressed conditions.

[2268] Thus, transcription factor polynucleotide sequences listed in the Sequence Listing recombined into, for example, one of the expression vectors of the invention, or another suitable expression vector, may be transformed into a plant for the purpose of modifying plant traits for the purpose of improving yield and/or quality. The expression vector may contain a constitutive, tissue-specific or inducible promoter operably linked to the transcription factor polynucleotide. The cloning vector may be introduced into a variety of plants by means well known in the art such as, for example, direct DNA transfer or Agrobacterium tumefaciens-mediated transformation. It is now routine to produce transgenic plants using most dicot plants (see Weissbach and Weissbach, (1989); Gelvin et al. (1990); Herrera-Estrella et al. (1983); Bevan (1984); and Klee (1985)). Methods for analysis of traits are routine in the art and examples are disclosed above.

[2269] Numerous protocols for the transformation of tomato and soy plants have been previously described, and are well known in the art. Gruber et al. (1993), and Glick and Thompson (1993) describe several expression vectors and culture methods that may be used for cell or tissue transformation and subsequent regeneration. For soybean transformation, methods are described by Miki et al. (1993); and U.S. Pat. No. 5,563,055, (Townsend and Thomas), issued Oct. 8, 1996.

[2270] There are a substantial number of alternatives to Agrobacterium-mediated transformation protocols, other methods for the purpose of transferring exogenous genes into soybeans or tomatoes. One such method is microprojectile-mediated transformation, in which DNA on the surface of microprojectile particles is driven into plant tissues with a biolistic device (see, for example, Sanford et al. (1987); Christou et al. (1992); Sanford (1993); Klein et al. (1987); U.S. Pat. No. 5,015,580 (Christou et al), issued May 14, 1991; and U.S. Pat. No. 5,322,783 (Tomes et al.), issued Jun. 21, 1994).

[2271] Alternatively, sonication methods (see, for example, Zhang et al. (1991)); direct uptake of DNA into protoplasts using CaCl₂ precipitation, polyvinyl alcohol or poly-L-ornithine (Hain et al. (1985); Draper et al. (1982)); liposome or spheroplast fusion (see, for example, Deshayes et al. (1985); Christou et al. (1987)); and electroporation of protoplasts and whole cells and tissues (see, for example, Donn et al. (1990); D'Halluin et al. (1992); and Spencer et al. (1994)) have been used to introduce foreign DNA and expression vectors into plants.

[2272] After a plant or plant cell is transformed (and the latter regenerated into a plant), the transformed plant may be crossed with itself or a plant from the same line, a non-transformed or wild-type plant, or another transformed plant from a different transgenic line of plants. Crossing provides the advantages of producing new and often stable transgenic varieties. Genes and the traits they confer that have been introduced into a tomato or soybean line may be moved into distinct line of plants using traditional backcrossing techniques well known in the art. Transformation of tomato plants may be conducted using the protocols of Koomneef et al (1986), and in U.S. Pat. No. 6,613,962, the latter method described in brief here. Eight day old cotyledon explants are precultured for 24 hours in Petri dishes containing a feeder layer of Petunia hybrida suspension cells plated on MS medium with 2% (w/v) sucrose and 0.8% agar supplemented with 10 μM α-naphthalene acetic acid and 4.4 μM 6-benzylaminopurine. The explants are then infected with a diluted overnight culture of Agrobacterium tumefaciens containing an expression vector comprising a polynucleotide of the invention for 5-10 minutes, blotted dry on sterile filter paper and cocultured for 48 hours on the original feeder layer plates. Culture conditions are as described above. Overnight cultures of Agrobacterium tumefaciens are diluted in liquid MS medium with 2% (w/v/) sucrose, pH 5.7) to an OD₆₀₀ of 0.8.

[2273] Following cocultivation, the cotyledon explants are transferred to Petri dishes with selective medium comprising MS medium with 4.56 μM zeatin, 67.3 μM vancomycin, 418.9 μM cefotaxime and 171.6 μM kanamycin sulfate, and cultured under the culture conditions described above. The explants are subcultured every three weeks onto fresh medium. Emerging shoots are dissected from the underlying callus and transferred to glass jars with selective medium without zeatin to form roots. The formation of roots in a kanamycin sulfate-containing medium is a positive indication of a successful transformation.

[2274] Transformation of soybean plants may be conducted using the methods found in, for example, U.S. Pat. No. 5,563,055 (Townsend et al., issued Oct. 8, 1996), described in brief here. In this method soybean seed is surface sterilized by exposure to chlorine gas evolved in a glass bell jar. Seeds are germinated by plating on 1/10 strength agar solidified medium without plant growth regulators and culturing at 28° C. with a 16 hour day length. After three or four days, seed may be prepared for cocultivation. The seedcoat is removed and the elongating radicle removed 3-4 mm below the cotyledons.

[2275] Overnight cultures of Agrobacterium tumefaciens harboring the expression vector comprising a polynucleotide of the invention are grown to log phase, pooled, and concentrated by centrifugation. Inoculations are conducted in batches such that each plate of seed was treated with a newly resuspended pellet of Agrobacterium. The pellets are resuspended in 20 ml inoculation medium. The inoculum is poured into a Petri dish containing prepared seed and the cotyledonary nodes are macerated with a surgical blade. After 30 minutes the explants are transferred to plates of the same medium that has been solidified. Explants are embedded with the adaxial side up and level with the surface of the medium and cultured at 22° C. for three days under white fluorescent light. These plants may then be regenerated according to methods well established in the art, such as by moving the explants after three days to a liquid counter-selection medium (see U.S. Pat. No. 5,563,055).

[2276] The explants may then be picked, embedded and cultured in solidified selection medium. After one month on selective media transformed tissue becomes visible as green sectors of regenerating tissue against a background of bleached, less healthy tissue. Explants with green sectors are transferred to an elongation medium. Culture is continued on this medium with transfers to fresh plates every two weeks. When shoots are 0.5 cm in length they may be excised at the base and placed in a rooting medium.

### Example XV

### Transformation of Monocots to Produce Increased Biomass, Disease Resistance or Abiotic Stress Tolerance

[2277] Cereal plants such as, but not limited to, corn, wheat, rice, sorghum, or barley, may be transformed with the present polynucleotide sequences, including monocot or dicot-derived sequences such as those presented in the present Tables, cloned into a vector such as pGA643 and containing a kanamycin-resistance marker, and expressed constitutively under, for example, the CaMV 35S or COR15 promoters, or with tissue-specific or inducible promoters. The expression vectors may be one found in the Sequence Listing, or any other suitable expression vector may be similarly used. For example, pMEN020 may be modified to replace the NptII coding region with the BAR gene of Streptomyces hygroscopicus that confers resistance to phosphinothricin. The KpnI and BglII sites of the Bar gene are removed by site-directed mutagenesis with silent codon changes.

[2278] The cloning vector may be introduced into a variety of cereal plants by means well known in the art including direct DNA transfer or Agrobacterium tumefaciens-mediated transformation. The latter approach may be accomplished by a variety of means, including, for example, that of U.S. Pat. No. 5,591,616, in which monocotyledon callus is transformed by contacting dedifferentiating tissue with the Agrobacterium containing the cloning vector.

[2279] The sample tissues are immersed in a suspension of 3×10⁻⁹ cells of Agrobacterium containing the cloning vector for 3-10 minutes. The callus material is cultured on solid medium at 25° C. in the dark for several days. The calli grown on this medium are transferred to Regeneration medium. Transfers are continued every 2-3 weeks (2 or 3 times) until shoots develop. Shoots are then transferred to Shoot-Elongation medium every 2-3 weeks. Healthy looking shoots are transferred to rooting medium and after roots have developed, the plants are placed into moist potting soil.

[2280] The transformed plants are then analyzed for the presence of the NPTII gene/kanamycin resistance by ELISA, using the ELISA NPTII kit from 5Prime-3Prime Inc. (Boulder, Colo.).

[2281] It is also routine to use other methods to produce transgenic plants of most cereal crops (Vasil (1994)) such as corn, wheat, rice, sorghum (Cassas et al. (1993)), and barley (Wan and Lemeaux (1994)). DNA transfer methods such as the microprojectile method can be used for corn (Fromm et al. (1990); Gordon-Kamm et al. (1990); Ishida (1990)), wheat (Vasil et al. (1992); Vasil et al. (1993); Weeks et al. (1993)), and rice (Christou (1991); Hiei et al. (1994); Aldemita and Hodges (1996); and Hiei et al. (1997)). For most cereal plants, embryogenic cells derived from immature scutellum tissues are the preferred cellular targets for transformation (Hiei et al. (1997); Vasil (1994)). For transforming corn embryogenic cells derived from immature scutellar tissue using microprojectile bombardment, the A188XB73 genotype is the preferred genotype (Fromm et al. (1990); Gordon-Kamm et al. (1990)). After microprojectile bombardment the tissues are selected on phosphinothricin to identify the transgenic embryogenic cells (Gordon-Kamm et al. (1990)). Transgenic plants are regenerated by standard corn regeneration techniques (Fromm et al. (1990); Gordon-Kamm et al. (1990)).

### Example XVI

### Transcription Factor Expression and Analysis of Disease Resistance or Abiotic Stress Tolerance

[2282] Northern blot analysis, RT-PCR or microarray analysis of the regenerated, transformed plants may be used to show expression of a transcription factor polypeptide or the invention and related genes that are capable of inducing disease resistance, abiotic stress tolerance, and/or larger size.

[2283] To verify the ability to confer stress resistance, mature plants overexpressing a transcription factor of the invention, or alternatively, seedling progeny of these plants, may be challenged by a stress such as a disease pathogen, drought, heat, cold, high salt, or desiccation. Alternatively, these plants may challenged in a hyperosmotic stress condition that may also measure altered sugar sensing, such as a high sugar condition. By comparing control plants (for example, wild type) and transgenic plants similarly treated, the transgenic plants may be shown to have greater tolerance to the particular stress.

[2284] After a dicot plant, monocot plant or plant cell has been transformed (and the latter regenerated into a plant) and shown to have greater size or tolerance to abiotic stress, or produce greater yield relative to a control plant under the stress conditions, the transformed monocot plant may be crossed with itself or a plant from the same line, a non-transformed or wild-type monocot plant, or another transformed monocot plant from a different transgenic line of plants.

[2285] These experiments would demonstrate that transcription factor polypeptides of the invention can be identified and shown to confer larger size, greater yield, greater disease resistance and/or abiotic stress tolerance in dicots or monocots, including tolerance or resistance to multiple stresses.

### Example XVII

### Sequences that Confer Significant Improvements to Non-Arabidopsis Species

[2286] The function of specific transcription factors of the invention, including closely-related orthologs, have been analyzed and may be further characterized and incorporated into crop plants. The ectopic overexpression of these sequences may be regulated using constitutive, inducible, or tissue specific regulatory elements. Genes that have been examined and have been shown to modify plant traits (including increasing biomass, disease resistance and/or abiotic stress tolerance) encode transcription factor polypeptides found in the Sequence Listing. In addition to these sequences, it is expected that newly discovered polynucleotide and polypeptide sequences closely related to polynucleotide and polypeptide sequences found in the Sequence Listing can also confer alteration of traits in a similar manner to the sequences found in the Sequence Listing, when transformed into a any of a considerable variety of plants of different species, and including dicots and monocots. The polynucleotide and polypeptide sequences derived from monocots (e.g., the rice sequences) may be used to transform both monocot and dicot plants, and those derived from dicots (e.g., the Arabidopsis and soy genes) may be used to transform either group, although it is expected that some of these sequences will function best if the gene is transformed into a plant from the same group as that from which the sequence is derived.

[2287] As an example of a first step to determine drought-related tolerance, seeds of these transgenic plants are subjected to germination assays to measure sucrose sensing. Sterile monocot seeds, including, but not limited to, corn, rice, wheat, rye and sorghum, as well as dicots including, but not limited to soybean and alfalfa, are sown on 80% MS medium plus vitamins with 9.4% sucrose; control media lack sucrose. All assay plates are then incubated at 22° C. under 24-hour light, 120-130 μEin/m²/s, in a growth chamber. Evaluation of germination and seedling vigor is then conducted three days after planting. Plants overexpressing sequences of the invention may be found to be more tolerant to high sucrose by having better germination, longer radicles, and more cotyledon expansion. These methods have been used to show that overexpressors of numerous sequences of the invention are involved in sucrose-specific sugar sensing. It is expected that structurally similar orthologs of these sequences, including those found in the Sequence Listing, are also involved in sugar sensing, an indication of altered osmotic stress tolerance.

[2288] Plants overexpressing the transcription factor sequences of the invention may also be subjected to soil-based drought assays to identify those lines that are more tolerant to water deprivation than wild-type control plants. A number of the lines of plants overexpressing transcription factor polypeptides of the invention, including newly discovered closely-related species, will be significantly larger and greener, with less wilting or desiccation, than wild-type control plants, particularly after a period of water deprivation is followed by rewatering and a subsequent incubation period. The sequence of the transcription factor may be overexpressed under the regulatory control of constitutive, tissue specific or inducible promoters, or may comprise a GAL4 transactivation domain fused to either the N- or the C terminus of the polypeptide. The results presented in Examples above indicate that these transcription factors may confer disease resistance or abiotic stress tolerance when they are overexpressed under the regulatory control of non-constitutive promoters or a transactivation domain fused to the clade member, without having a significant adverse impact on plant morphology and/or development. The lines that display useful traits may be selected for further study or commercial development.

[2289] Monocotyledonous plants, including rice, corn, wheat, rye, sorghum, barley and others, may be transformed with a plasmid containing a transcription factor polynucleotide. The transcription factor gene sequence may include dicot or monocot-derived sequences such as those presented herein. These transcription factor genes may be cloned into an expression vector containing a kanamycin-resistance marker, and then expressed constitutively or in a tissue-specific or inducible manner.

[2290] The cloning vector may be introduced into monocots by, for example, means described in the previous Example, including direct DNA transfer or Agrobacterium tumefaciens-mediated transformation. The latter approach may be accomplished by a variety of means, including, for example, that of U.S. Pat. No. 5,591,616, in which monocotyledon callus is transformed by contacting dedifferentiating tissue with the Agrobacterium containing the cloning vector.

[2291] The sample tissues are immersed in a suspension of 3×10⁻⁹ cells of Agrobacterium containing the cloning vector for 3-10 minutes. The callus material is cultured on solid medium at 25° C. in the dark for several days. The calli grown on this medium are transferred to Regeneration medium. Transfers are continued every 2-3 weeks (2 or 3 times) until shoots develop. Shoots are then transferred to Shoot-Elongation medium every 2-3 weeks. Healthy looking shoots are transferred to rooting medium and after roots have developed, the plants are placed into moist potting soil.

[2292] The transformed plants are then analyzed for the presence of the NPTII gene/kanamycin resistance by ELISA, using the ELISA NPTII kit from 5Prime-3Prime Inc. (Boulder, Colo.).

[2293] Northern blot analysis, RT-PCR or microarray analysis of the regenerated, transformed plants may be used to show expression of a transcription factor polypeptide of the invention that is capable of conferring abiotic stress tolerance, disease resistance, or increased size or yield, in the transformed plants.

[2294] To verify the ability to confer abiotic stress tolerance, mature plants or seedling progeny of these plants expressing a monocot-derived equivalog gene may be challenged using methods described in the above Examples. By comparing wild type plants and the transgenic plants, the latter are shown be more tolerant to abiotic stress, more resistant to disease, and/or have increased biomass, as compared to wild type control plants similarly treated.

[2295] It is expected that the same methods may be applied to identify other useful and valuable sequences of the present transcription factor clades, and the sequences may be derived from a diverse range of species.

### REFERENCES CITED

[2296] Abe et al. (1997) Plant Cell 9: 1859-1868
[2297] Abe et al. (2003) Plant Cell 15: 63-78
[2298] Affolter et al. (1990) Curr. Opin. Cell. Biol. 2: 485-495
[2299] Agrios, G. N. (1997) Plant Pathology. 4^{th} edition. (Academic Press, San Diego, New York)
[2300] Aldemita and Hodges (1996) Planta 199: 612-617
[2301] Alia et al. (1998) Plant J. 16: 155-161
[2302] Allen (1998) EMBO J. 17: 5484-5496.
[2303] Altschul (1990) J. Mol. Biol. 215: 403-410
[2304] Altschul (1993) J. Mol. Evol. 36: 290-300
[2305] Anderson and Young (1985) “Quantitative Filter Hybridisation”, In: Hames and Higgins, ed., Nucleic Acid Hybridisation, A Practical Approach. Oxford, IRL Press, 73-111
[2306] Anderson et al. (2004) Plant Cell 16: 3460-3479.
[2307] Aravind and Landsman (1998) Nucleic Acids Res. 26: 4413-4421
[2308] Arents and Moudrianakis (1995) Proc. Natl. Acad. Sci. USA 92: 11170-11174
[2309] Atchley and Fitch (1997) Proc. Natl. Acad. Sci. USA 94: 5172-5176
[2310] Atchley et al. (1999) J. Mol. Evol. 48: 501-516
[2311] Ausubel et al. (1997) Short Protocols in Molecular Biology, John Wiley & Sons, New York, N.Y., unit 7.7
[2312] Bailey et al. (2003) Plant Cell 15: 2497-2502
[2313] Bairoch et al. (1997) Nucleic Acids Res. 25: 217-221
[2314] Bänzinger et al. (2000) Breeding for drought and nitrogen stress tolerance in maize. From theory to practice. (Mexico: CIMMYT (The International Maize and Wheat Improvement Center))
[2315] Barthelemy et al. (1996) Biochem. Biophys. Res. Commun. 224: 870-876
[2316] Bates et al. (1973) Plant Soil 39: 205-207
[2317] Baudino and Cleveland (2001) Mol. Cell. Biol. 21: 691-702
[2318] Bechtold and Pelletier (1998) Methods Mol. Biol. 82: 259-266
[2319] Berger and Kimmel (1987) “Guide to Molecular Cloning Techniques”, in Methods in Enzymology, vol. 152, Academic Press, Inc., San Diego, Calif.
[2320] Berger et al. (1998) Curr. Biol. 8: 421-430
[2321] Berrocal-Lobo et al. (2002) Plant J. 29: 23-32
[2322] Berrocal-Lobo and Molina (2004) Mol. Plant Microbe Interact. 17: 763-770
[2323] Bevan (1984) Nucleic Acids Res. 12: 8711-8721
[2324] Bezhani et al. (2001) J. Biol. Chem. 276: 23785-23789
[2325] Bhattachaijee et al. (2001) Proc. Natl. Acad. Sci. USA 98: 13790-13795
[2326] Bi et al. (1997) J. Biol. Chem. 272: 26562-26572
[2327] Bianchi and Beltrame (2000) EMBO Rep. 1: 109-114
[2328] Boter (2004) Genes Dev. 18: 1577-1591
[2329] Borevitz et al. (2000) Plant Cell 12: 2383-2393
[2330] Boss and Thomas (2002) Nature 416: 847-850
[2331] Boyer (1995) Annu. Rev. Phytopathol. 33: 251-274.
[2332] Brown et al. (2003) Plant Physiol. 132: 1020-1032
[2333] Brownlie et al. (1997) Structure 5: 509-520
[2334] Bruce et al. (2000) Plant Cell 12: 65-79
[2335] Bucher and Trifonov (1988) J. Biomol. Struct. Dyn. 5: 1231-1236
[2336] Bucher (1990) J. Mol. Biol. 212: 563-578
[2337] Buck and Atchley (2003) J. Mol. Evol. 56: 742-750
[2338] Burglin (1997) Nucleic Acids Res. 25: 4173-4180
[2339] Burglin (1998) Dev. Genes Evol. 208: 113-116
[2340] Byrne (2000) Nature 408: 967-971
[2341] Caretti et al. (2003) J. Biol. Chem. 278: 30435-30440
[2342] Carre and Kay (1995) Plant Cell 7: 2039-2051
[2343] Carroll (2000) Cell 101: 577-580
[2344] Carson et al. (1997) Plant J. 12: 1231-1240
[2345] Cassas et al. (1993) Proc. Natl. Acad. Sci. USA 90: 11212-11216
[2346] Chae et al. (2004) Oncogene 23: 4084-4088
[2347] Chakravarthy et al. (2003) Plant Cell 15: 3033-3050
[2348] Chang and Liu (1994) J. Biol. Chem. 269: 17893-17898
[2349] Chase et al. (1993) Ann. Missouri Bot. Gard. 80: 528-580
[2350] Chen et al. (2002a) Plant Cell 14: 559-574.
[2351] Chen and Chen (2002) Plant Physiol. 129: 706-716
[2352] Cheong et al. (2002) Plant Physiol. 129: 661-677
[2353] Cheong et al. (2003) Plant Physiol. 132: 1961-1972
[2354] Chini et al. (2004) Plant J. 38: 810-822.
[2355] Chinnusamy et al. (2003) Genes Dev. 17: 1043-1054
[2356] Chinthapalli et al. (2002) in Reviews in Plant Biochemistry and Biotechnology, Goyal, A. et al (eds.) pp. 143-159
[2357] Christou et al. (1987) Proc. Natl. Acad. Sci. USA 84: 3962-3966
[2358] Christou (1991) Bio/Technol. 9:957-962
[2359] Christou et al. (1992) Plant. J. 2: 275-281
[2360] Ciarapica et al. (2003) J. Biol. Chem. 278: 12182-12190
[2361] Costa and Dolan (2003) Development 130: 2893-2901
[2362] Coupland (1995) Nature 377: 482-483
[2363] Coustry et al. (1995) J. Biol. Chem. 270: 468-475
[2364] Coustry et al. (1996) J. Biol. Chem. 271: 14485-14491
[2365] Coustry et al. (1998) Biochem J. 331(Pt 1): 291-297
[2366] Coustry et al. (2001) J. Biol. Chem. 276: 40621-40630.
[2367] Crawford et al. (2004) Plant Physiol. 135: 244-253
[2368] Crozatier et al. (1996) Curr. Biol. 6: 707-718
[2369] Cubas et al. (1999) Plant J. 18: 215-222
[2370] Currie (1997) J. Biol. Chem. 272: 30880-30888
[2371] Daly et al. (2001) Plant Physiol. 127: 1328-1333
[2372] Dang et al. (1992) Proc. Natl. Acad. Sci. USA 89: 599-602
[2373] Dang et al. (1996) J. Bacteriol. 178: 1842-1849
[2374] de Pater et al. (1996) Nucleic Acids Res. 24: 4624-4631
[2375] Dellagi et al. (2000) Mol. Plant Microbe Interact. 13: 1092-110
[2376] Deshayes et al. (1985) EMBO J.: 4: 2731-2737
[2377] D'Halluin et al. (1992) Plant Cell 4: 1495-1505
[2378] Di Cristina et al. (1996) Plant J. 10: 393-402
[2379] Doebley and Lukens (1998) Plant Cell 10: 1075-1082
[2380] Donn et al. (1990) in Abstracts of VIIth International Congress on Plant Cell and Tissue Culture IAPTC, A2-38: 53
[2381] Doolittle, ed (1996) Methods in Enzymology, vol. 266: “Computer Methods for Macromolecular Sequence Analysis” Academic Press, Inc., San Diego, Calif., USA
[2382] Draper et al. (1982) Plant Cell Physiol. 23: 451-458
[2383] Du and Chen (2000) Plant J. 24: 837-847
[2384] Duboule (1994), (ed.) Guidebook to the homeobox genes Oxford University Press, Oxford
[2385] Duckett et al. (1994) Development 120: 3247-3255
[2386] Ecker (1995) Science 268: 667-675
[2387] Eddy (1996) Curr. Opin. Str. Biol. 6: 361-365
[2388] Edwards et al. (1998) Plant Physiol. 117: 1015-1022.
[2389] Eimert et al. (1995) Plant Cell 7: 1703-1712
[2390] Ellenberger et al. (1994) Genes Dev. 8: 970-980
[2391] Eulgem et al. (1999) EMBO J. 18: 4689-4699
[2392] Eulgem (2000) Trends Plant Sci. 5: 199-206.
[2393] Ezcurra et al. (2000) Plant J. 24: 57-66
[2394] Fairchild et al. (2000) Genes Dev. 14: 2377-2391
[2395] Fairman et al. (1993) Proc. Natl. Acad. Sci. USA 90: 10429-10433
[2396] Falvo et al. (1995) Cell 83: 1101-1111
[2397] Feng and Doolittle (1987) J. Mol. Evol. 25: 351-360
[2398] Ferre-D'Amare et al. (1994) EMBO J. 13: 180-189
[2399] Finkelstein et al. (1998) Plant Cell 10: 1043-1054
[2400] Fischer and Droge-Laser (2004) Mol. Plant. Microbe Interact. 17: 1162-1171
[2401] Fisher and Goding (1992) EMBO J. 11: 4103-4109
[2402] Fisher and Caudy (1998) Bioessays 20: 298-306
[2403] Forsburg and Guarente (1988) Genes Dev. 3: 1166-117
[2404] Forzani et al. (2001) J. Biol. Chem. 276: 16731-16738
[2405] Fowler et al. (2002) Plant Cell 14: 1675-1679
[2406] Fowler and Thomashow (2002) Plant Cell 14: 1675-1690
[2407] Frampton et al. (1991) Protein Eng. 4: 891-901
[2408] Frank et al. (2000) Plant Cell 12: 111-124.
[2409] Freeling and Hake (1985) Genetics 111: 617-634
[2410] Friedrichsen et al. (2002) Genetics 162: 1445-1456
[2411] Fromm et al. (1990) Bio/Technol. 8: 833-839
[2412] Fu et al. (2001) Plant Cell 13: 1791-1802
[2413] Fuji et al. (2000) Nat. Struct. Biol. 7: 889-893
[2414] Fujimoto et al. (2000) Plant Cell 12: 393-404
[2415] Fujimoto et al. (2004) Plant Mol. Biol. 56: 225-239
[2416] Galigniana et al. (1998) Mol. Endocrinol. 12:1903-1913
[2417] Galway et al. (1994) Dev. Biol. 166: 740-754
[2418] Gampala et al. (2004). International Conference on Arabidopsis Research. Berlin. Abstract # T04-085
[2419] Gancedo (1998) Microbiol. Mol. Biol. Rev. 62: 334-361.
[2420] Gaxiola et al. (2001) Proc. Natl. Acad. Sci. USA 98: 11444-11449.
[2421] Gelinas et al. (1985) Prog. Clin. Biol. Res. 191: 125-139
[2422] Gelvin et al. (1990) Plant Molecular Biology Manual, Kluwer Academic Publishers
[2423] Gilmour et al. (1998) Plant J. 16: 433-442
[2424] Giraudat et al. (1992) Plant Cell 4: 1251-1261
[2425] Glick and Thompson, eds. (1993) Methods in Plant Molecular Biology and Biotechnology. CRC Press., Boca Raton, Fla.
[2426] Goff et al. (1992) Genes Dev. 6: 864-875
[2427] Good and Chen (1996) Biol Signals 5: 163-169
[2428] Goodrich et al. (1993) Cell 75: 519-530
[2429] Gordon-Kamm et al. (1990) Plant Cell 2: 603-618
[2430] Graf (1992) Curr. Opin. Genet. Dev. 2: 249-255.
[2431] Grandori et al. (2000) Ann. Rev. Cell. Dev. Biol. 16: 653-699
[2432] Grant et al. (2003) Mol. Plant Microbe Interact. 16: 669-680.
[2433] Grasser (1995) Plant J. 7: 185-192
[2434] Grasser (2003) Plant Mol. Biol. 53: 281-295
[2435] Gruber et al. ((1993) in Methods in Plant Molecular Biology and Biotechnology, p. 89-119
[2436] Gu et al. (2000) Plant Cell 12: 771-786
[2437] Gu et al. (2002) Plant Cell 14: 817-831
[2438] Guiltinan et al. (1990) Science 250: 267-271
[2439] Guo et al. (2004) Plant Mol. Biol. 55: 607-618.
[2440] Gupta et al (1997a) Plant Mol. Biol. 35: 987-992
[2441] Gupta et al. (1997b) Plant Mol. Biol. 34: 529-536
[2442] Gusmaroli et al. (2001) Gene 264: 173-185
[2443] Gusmaroli et al. (2002) Gene 283: 41-48
[2444] Haake et al. (2002) Plant Physiol. 130: 639-648
[2445] Hain et al. (1985) Mol. Gen. Genet. 199: 161-168
[2446] Hall et al. (2000) Plant Physiol. 123: 1449-1458.
[2447] Halliday et al. (1999) Proc. Natl. Acad. Sci. USA 96: 5832-5837
[2448] Haymes et al. “Nucleic Acid Hybridization: A Practical Approach”, IRL Press, Washington, D.C. (1985)
[2449] Hanes and Brent (1989) Cell 57: 1275-1283
[2450] Hanes and Brent (1991) Science 251: 426-430
[2451] Hao et al. (1998) J. Biol. Chem. 273: 26857-26861
[2452] Hao (2002) Biochemistry 41: 4202-4208
[2453] Harper (2002) WO0216655
[2454] Hasegawa et al. (2000) Annu. Rev. Plant Mol. Plant Physiol. 51: 463-499.
[2455] Hatch (1987) Biochim. Biophys. Acta 895: 81-106
[2456] Hattori et al. (1992) Genes Dev. 6: 609-618
[2457] Hayashi and Scott (1990) Cell 63: 883-894
[2458] He et al. (2000) Transgenic Res. 9: 223-227
[2459] He et al. (2001) Mol. Plant. Microbe Interact. 14: 1453-1457
[2460] Heim et al. (2003) Mol. Biol. Evol. 20: 735-747
[2461] Hein (1990) Methods Enzymol. 183: 626-645
[2462] Heisler et al. (2001) Development 128: 1089-1098
[2463] Hempel (1997) Development 124: 3845-3853
[2464] Henikoff and Henikoff (1991) Nucleic Acids Res. 19: 6565-6572
[2465] Herrera-Estrella et al. (1983) Nature 303: 209
[2466] Hiei et al. (1994) Plant J. 6:271-282
[2467] Hiei et al. (1997) Plant Mol. Biol. 35:205-218
[2468] Higgins and Sharp (1988) Gene 73: 237-244
[2469] Higgins et al. (1996) Methods Enzymol. 266: 383-402
[2470] Hirano et al. (2002) Gene 290: 107-114
[2471] Hobo et al. (1999) Proc. Natl. Acad. Sci. USA 96: 15348-15353
[2472] Hoecker et al. (1995) Genes Dev. 9: 2459-2469
[2473] Hsieh et al. (1998) Proc. Natl. Acad. Sci. USA 95: 13965-13970
[2474] Hu et al. (2003) Plant Cell 15: 1951-1961
[2475] Hu et al. (2004) Cell Res. 14: 8-15
[2476] Hung et al. (1998) Plant Physiol. 117: 73-84
[2477] Huq and Quail (2002) EMBO J. 21: 2441-2450
[2478] Huth et al. (1997) Nat. Struct. Biol. 4: 657-665
[2479] Hwang and Goodman (1995) Plant J. 8: 37-43
[2480] Ishida (1990) Nature Biotechnol. 14:745-750
[2481] Ishiguro and Nakamura (1994) Mol. Gen. Genet. 244: 563-571
[2482] Ito et al. (1995) Plant Cell Physiol. 36: 1281-1289
[2483] Jaglo et al. (2001) Plant Physiol. 127: 910-917
[2484] Jaglo-Ottosen et al. (1998) Science. 280:104-106
[2485] Jakoby et al. (2002) Trends Plant Sci. 7: 106-111
[2486] Jaglo et al. (2001) Plant Physiol. 127: 910-917
[2487] Jang et al. (1997) Plant Cell 9: 5-19
[2488] Jofuku et al. (1994) Plant Cell 6: 1211-1225
[2489] Johnson and McKnight (1989) Ann. Rev. Biochem. 58: 799-839
[2490] Johnson et al. (2002) Plant Cell 14: 1359-1375
[2491] Kagaya et al. (1999) Nucleic Acids Res. 27: 470-478
[2492] Kaiser et al. (1998) Science 281: 1202-1206
[2493] Kashima et al. (1985) Nature 313: 402-404
[2494] Kasuga et al. (1999) Nature Biotechnol. 17: 287-291
[2495] Kehoe et al. (1994) Plant Cell 6: 1123-1134
[2496] Keith et al. (1994) Plant Cell 6: 589-600
[2497] Kerstetter et al. (1994) Plant Cell 6: 1877-1887
[2498] Kerstetter et al. (1997) Development 124: 3045-3054
[2499] Kim and Sheffrey (1990) J. Biol. Chem. 265: 13362-13369
[2500] Kim et al. (1996) Mol. Cell. Biol 0.16: 4003-4013
[2501] Kim et al. (2001) Plant J. 25: 247-259
[2502] Kim et al. (2004) Plant Mol. Biol. 55: 883-904
[2503] Kimmel (1987) Methods Enzymol. 152: 507-511
[2504] Kirik et at. (2004a) Dev. Biol. 268: 506-513
[2505] Kirik et al. (2004b) Plant Mol. Biol. 55: 389-398
[2506] Kissinger et al. (1990) Cell 63: 579-590
[2507] Klee (1985) Bio/Technology 3: 637-642
[2508] Klein et al. (1987) Nature 327: 70-73
[2509] Knight (2000a) Int. Rev. Cytol. 195: 269-324.
[2510] Koornneef et al (1986) In Tomato Biotechnology: Alan R. Liss, Inc., 169-178
[2511] Krizek (1999) Dev. Genet. 25: 224-236
[2512] Ku et al. (2000) Proc. Natl. Acad. Sci. USA 97: 9121-9126
[2513] Kunst et al. (2000) Biochem Soc. Trans. 28: 651-654.
[2514] Kusnetsov et al. (1999) J. Biol. Chem. 274: 36009-36014
[2515] Kwak et al. (2005) Science 307: 1111-1113
[2516] Kwong (2003) Plant Cell 15: 5-18
[2517] Kyozuka and Shimamoto (2002) Plant Cell Physiol. 43: 130-135
[2518] Lapik and Kaufman (2003) Plant Cell 15: 1578-1590
[2519] Larkin et al. (2003) Ann. Rev. Plant Biol. 54: 403-430
[2520] Lebel et al. (1998) Plant J. 16: 223-233
[2521] Ledent and Vervoort (2001) Genome Res. 11: 754-770
[2522] Lee and Schiefelbein (1999) Cell 99: 473-483
[2523] Lee et al. (2002) Genome Res. 12: 493-502
[2524] Lee and Schiefelbein (2002) Plant Cell 14: 611-618
[2525] Lee et al. (2003) Proc. Natl. Acad. Sci. USA 100: 2152-2156.
[2526] Lee et al. (2004) Plant Mol. Biol. 55: 61-81.
[2527] Lefstin and Yamamoto (1998) Nature 392: 885-888
[2528] Leon-Kloosterziel et al. (1996) Plant Physiol. 110: 233-240
[2529] Levens (2003) Genes Dev. 17: 1071-1077
[2530] Li et al. (1992) Nucleic Acids Res. 20: 1087-1091
[2531] Li et al. (1998) EMBO J. 17: 6300-6315
[2532] Lin et al. (1991) Nature 353: 569-571
[2533] Lincoln et al. (1990) Plant Cell 2: 1071-1080
[2534] Liscum and Reed (2002) Plant Mol. Biol. 49: 387-400
[2535] Littlewood and Evan (1998) Helix-Loop-Helix Transcription Factors (New York: Oxford University Press)
[2536] Liu and Zhu (1997) Proc. Natl. Acad. Sci. USA 94: 14960-14964
[2537] Liu et al. (1999) Eur. J. Biochem. 262: 247-257
[2538] Livingston et al. (2004) Economic and policy implications of wind-borne entry of Asian soybean rust into the United States. http://www.ers.usda.gov/Features/SoyBeanRust/
[2539] Long et al. (1996) Nature 379: 66-69
[2540] Long and Barton (2000) Dev. Biol. 218: 341-353
[2541] Lorenzo et al. (2003) Plant Cell 15: 165-178
[2542] Lorenzo et al. (2004) Plant Cell 16: 1938-1950
[2543] Lotan et al. (1998) Cell 93: 1195-1205.
[2544] Loulergue et al. (1998) Gene 225: 47-57
[2545] Ludwig et al. (1989) Proc. Natl. Acad. Sci. USA 86: 7092-7096
[2546] Ludwig et al. (1990) Cell 62: 849-851
[2547] Luerssen et al. (1998) Plant J. 15: 755-764
[2548] Luger et al. (1997) Nature 389: 251-260
[2549] Lynch et al. (2002) Phytopathol. 92: S33.
[2550] Ma et al. (1994) Cell 77: 451-459
[2551] Mackay and Crossley (1998) Trends Biochem. Sci. 23: 1-4
[2552] Maity and de Crombrugghe (1998) Trends Biochem. Sci. 23: 174-178
[2553] Maleck (2000) Nat. Genet. 26: 403-410
[2554] Mandel (1992) Nature 360: 273-277
[2555] Mandel et al. (1992) Cell 71-133-143
[2556] Mantovani (1998) Nucleic Acids Res. 26: 1135-1143
[2557] Mantovani (1999) Gene 239: 15-27.
[2558] Mare et al. (2004) Plant Mol. Biol. 55: 399-416
[2559] Martin and Paz-Ares (1997) Trends Genet. 13: 67-73
[2560] Martinez-Garcia and Quail (1999) Plant J. 18: 173-183
[2561] Martinez-Garcia et al. (2000) Science 288: 859-863
[2562] Masiero et al. (2002) J. Biol. Chem. 277: 26429-26435
[2563] Massari and Murre (2000) Mol. Cell. Biol. 20: 429-440
[2564] Masucci J. et al. (1996) Development 122: 1253-1260
[2565] Mazon et al. (1982) Eur. J. Biochem. 127: 605-608
[2566] McCarty et al. (1989) Plant Cell 1: 523-532
[2567] McCarty et al. (1991) Cell 66: 895-905
[2568] McCue and Hanson (1990) Trends Biotechnol. 8: 358-362
[2569] McNabb et al. (1995) Genes Dev. 9: 47-58
[2570] McNabb et al. (1997) Mol. Cell. Biol. 17: 7008-7018
[2571] Meijer et al. (1996) Plant Mol. Biol. 31: 607-618
[2572] Meinke (1992) Science 258: 1647-1650
[2573] Meinke et al. (1994) Plant Cell 6: 1049-1064
[2574] Merlot et al. (2001) Plant J. 25: 295-303.
[2575] Mewes et al. (2002) Nucleic Acids Res. 30: 31-34
[2576] Meyers (1995) Molecular Biology and Biotechnology, Wiley VCH, New York, N.Y., p 856-853
[2577] Miki et al. (1993) in Methods in Plant Molecular Biology and Biotechnology, p. 67-88, Glick and Thompson, eds., CRC Press, Inc., Boca Raton
[2578] Miles et al. (2003) Soybean rust: is the U.S. soybean crop at risk? http://www.apsnet.org/online/feature/rust/
[2579] Miyoshi et al. (2003) Plant J. 36: 532-540
[2580] Mizukama and Fischer (2000) Proc. Natl. Acad. Sci. USA 97-942-947
[2581] Mizukami (2001) Curr Opinion Plant Biol. 4: 533-539
[2582] Mohr and Cahill (2001) Functional Plant Biology 30: 461-469
[2583] Mount (2001), in Bioinformatics: Sequence and Genome Analysis, Cold Spring Harbor Laboratory Press, Cold Spring Harbor, N.Y., page 543
[2584] Müller et al. (2001) Plant J. 28: 169-179
[2585] Munkvold (2003) Annu. Rev. Phytopathol. 41: 99-116.
[2586] Murre et al. (1989) Cell 56: 777-783
[2587] Myers et al. (1986) Science 232: 613-618
[2588] Nair and Burley (2000) Nature 404: 715:717-718
[2589] Nakshatri (1996) J. Biol. Chem. 271: 28784-28791.
[2590] Nambara et al. (1995) Development 121: 629-636
[2591] Nandi et al. (2000) Curr. Biol. 10: 215-218
[2592] Nath et al. (2003) Science 299: 1404-1407
[2593] Nesi et al. (2000) Plant Cell 12: 1863-1878
[2594] Ni et al. (1998) Cell 95: 657-667
[2595] Nieto-Sotelo and Quail (1994) Biochem. Soc. Symp. 60: 265-275
[2596] North Dakota State University Extension Service. (2002). Managing Row Crop Diseases in Drought Years. http://www.ag.ndsu.nodak.edu/drought/ds-10-97.htm
[2597] North Dakota State University Extension Service. (2004). Small Grain Diseases: Management of Those More Common and Severe in Dry Years. http://www.ag.ndsu.nodak.edu/drought/ds-01-02.htm
[2598] Novillo et al. (2004) Proc. Natl. Acad. Sci. USA 101: 3985-3990
[2599] Odell (1985) Nature 313: 810-812
[2600] Ohme-Takagi and Shinshi (1995) Plant Cell 7: 173-182
[2601] Ohta et al. (2001) Plant Cell 13: 1959-1968
[2602] Okamuro et al. (1997) Proc. Natl. Acad. Sci. USA 94: 7076-7081
[2603] Olesen and Guarente (1990) Genes Dev. 4: 1714-1729
[2604] Onate et al. (1994) Mol. Cell. Biol. 14: 3376-3391
[2605] Onate-Sanchez and Singh (2002) Plant Physiol. 128: 1313-1322
[2606] Ooms et al. (1993) Plant Physiol. 102: 1185-1191
[2607] Palatnik et al. (2003) Nature 425: 257-263
[2608] Parcy and Giraudat (1997) Plant J. 11: 693-702
[2609] Parcy et al. (1997) Plant Cell 9: 1265-1277
[2610] Park (2001) Plant Cell 13: 1035-1046.
[2611] Payne et al. (2000) Genetics 156: 1349-1362
[2612] Peng et al. (1997) Genes Development 11: 3194-3205)
[2613] Peng et al. (1999) Nature: 400: 256-261
[2614] Pinkham and Guarente (1985) Mol. Cell. Biol. 5: 3410-3416.
[2615] Pnueli et al. (2002) Plant J 31: 319-330
[2616] Porra et al. (1989) Biochim. Biophys. Acta 975: 384-394
[2617] Pourtau et al. (2004) Planta 219: 765-772
[2618] Putterill et al (1995) Cell 80: 847-857
[2619] Rajani and Sundaresan (2001) Curr. Biol. 11: 1914-1922
[2620] Ratcliffe et al. (1990) Plant Physiol. 126: 122-132
[2621] Reeves and Nissen (1990) J. Biol. Chem. 265: 8573-8582
[2622] Reeves (2001) Gene 277: 63-81.
[2623] Reeves and Beckerbauer (2001) Biochim Biophys Acta 1519: 13-29.
[2624] Reidt et al. (2000) Plant J. 21: 401-408
[2625] Remm et al. (2001) J. Mol. Biol. 314: 1041-1052
[2626] Reuber (1998) Plant J. 16: 473-485.
[2627] Riechmann and Meyerowitz (1998) Biol. Chem. 379: 633-646
[2628] Riechmann et al. (2000a) Science 290: 2105-2110
[2629] Riechmann and Ratcliffe (2000b) Curr. Opin. Plant Biol. 3: 423-434
[2630] Rieger et al. (1976) Glossary of Genetics and Cytogenetics: Classical and Molecular, 4th ed., Springer Verlag, Berlin
[2631] Rieping and Schoffl (1992) Mol. Gen. Genet. 231: 226-232
[2632] Rigaut et al. (1999) Nat. Biotechnol. 17: 1030-1032
[2633] Robatzek and Somssich (2002) Genes Dev. 16: 1139-1149
[2634] Robinson et al. (2000) Nucleic Acids Res. 28: 4460-4466
[2635] Robson et al. (2001) Plant J. 28: 619-631
[2636] Rohila et al. (2004) Plant J. 38: 172-181
[2637] Romier et al. (2003) J. Biol. Chem. 278: 1336-1345
[2638] Rushton et al. (1995) Plant Mol. Biol. 29: 691-702
[2639] Rushton et al. (1996) EMBO J. 15: 5690-5700
[2640] Sadowski et al. (1988) Nature 335: 563-564
[2641] Saijo et al. (2000) Plant J. 23: 319-327.
[2642] Sakuma et al. (2002) Biochem. Biophys. Res. Comm. 290: 998-1009
[2643] Saleki et al. (1993) Plant Physiol. 101: 839-845
[2644] Salsi et al. (2003) J. Biol. Chem. 278: 6642-6650
[2645] Sambrook et al. (1989) Molecular Cloning: A Laboratory Manual, 2nd Ed., Cold Spring Harbor Laboratory, Cold Spring Harbor, N.Y.
[2646] Sanchez and Cejudo (2003) Plant Physiol. 132: 949-957
[2647] Sanders et al. (1999) Plant Cell 11: 691-706
[2648] Sanford et al. (1987) Part. Sci. Technol. 5:27-37
[2649] Sanford (1993) Methods Enzymol. 217: 483-509
[2650] Schaffer et al. (1998) Cell 93: 1219-1229
[2651] Schellmann et al. (2002) EMBO J. 21: 5036-5046
[2652] Schindler et al. (1993) Plant J. 4: 137-150
[2653] Schnittger et al. (1998) Development 125: 2283-2289
[2654] Schnittger et al. (1999) Plant Cell 11: 1105-1116
[2655] Schoof et al. (2000) Cell 100: 635-644
[2656] Sessa et al. (1994) Molecular genetic analysis of plant development and metabolism. (Berlin: Springer Verlag).
[2657] Sharp and LeNoble (2002) J. Exp. Bot. 53: 33-37.
[2658] Sheen (1999) Ann. Rev. Plant Physiol. Plant Mol. Biol. 50: 187-217
[2659] Shimizu et al. (1997) EMBO J. 16: 4689-4697
[2660] Shin et al. (2002) Mol Plant Microbe Interact 15: 983-989.
[2661] Shirakata et al. (1993) Genes Dev. 7: 2456-2470
[2662] Shpaer (1997) Methods Mol. Biol. 70: 173-187
[2663] Silver et al. (2003) Mol. Cell. Biol. 23: 5989-5999
[2664] Sinha et al. (1996) Mol. Cell. Biol. 16: 328-337
[2665] Sivamani et al. (2000) Plant Science 155: 1-9
[2666] Smalle et al (1998) Proc. Natl. Acad. Sci. USA. 95:3318-3322
[2667] Smeekens (1998) Curr. Opin. Plant Biol. 1: 230-234
[2668] Smith et al. (1992) Protein Engineering 5: 35-51
[2669] Smolen et al. (2002) Genetics 161: 1235-1246
[2670] Soltis et al. (1997) Ann. Missouri Bot. Gard. 84: 1-49
[2671] Solano et al. (1998) Genes Dev. 12: 3703-3714
[2672] Sonnhammer et al. (1997) Proteins 28: 405-420
[2673] Sorensen et al. (2003) Plant J. 33: 413-423
[2674] Spencer et al. (1994) Plant Mol. Biol. 24: 51-61
[2675] Spollen et al. (2000) Plant Physiol. 122: 967-976.
[2676] Stockinger et al. (1997) Proc. Natl. Acad. Sci. USA 94: 1035-1040
[2677] Stone et al. (2001) Proc. Natl. Acad. Sci. USA 98: 11806-11811
[2678] Surpin et al. (2002) Plant Cell 14 Suppl: S327-S338
[2679] Suzuki et al. (1997) Plant Cell 9: 799-807
[2680] Suzuki et al. (2001) Plant J. 28: 409-418
[2681] Suzuki et al. (2003) Plant Physiol. 132: 1664-1677
[2682] Svensson et al. (2003) Arch. Biochem. Biophys. 414: 180-188
[2683] Tahtihaiu and Palva (2001) Plant J 26: 461-470.
[2684] Tamminen et al. (2001) Plant J. 25: 1-8
[2685] Tanimoto et al. (1995) Plant J. 8: 943-948
[2686] Tasanen et al. (1992) J. Biol. Chem. 267: 11513-11519
[2687] Taylor and Scheuring (1994) Mol. Gen. Genet. 243: 148-157
[2688] Tepperman et al. (2001) Proc. Natl. Acad. Sci. USA 98: 9437-9442
[2689] Thaler and Bostock (2003) Ecology 85: 48-58.
[2690] Thoma (1994) Plant Physiol. 105: 35-45
[2691] Thompson et al. (1994) Nucleic Acids Res. 22: 4673-4680
[2692] Tiwari et al. (2001) Plant Cell 13: 2809-2822
[2693] Tiwari et al. (2003) Plant Cell 15: 533-543
[2694] Toledo-Ortiz et al. (2003) Plant Cell 15: 1749-1770
[2695] Toumier et al. (2003) FEBS Lett. 550: 149-154
[2696] Toyama et al. (1999) Plant Cell Physiol. 40: 1087-1092
[2697] Truernit and Sauer (1995) Planta 196: 564-570
[2698] Tudge (2000) in The Variety of Life, Oxford University Press, New York, N.Y. pp. 547-606
[2699] Ulmasov et al. (1997) Science 276: 1865-1868
[2700] Vasil et al. (1992) Bio/Technol 10:667-674
[2701] Vasil et al. (1993) Bio/Technol 11:1553-1558
[2702] Vasil (1994) Plant Mol. Biol. 25: 925-937
[2703] Verslues and Sharp (1999) Plant Physiol. 119: 1349-1360
[2704] Vicient et al. (2000) J. Exp. Bot. 51: 995-1003
[2705] Vollbrecht et al. (1991) Nature 350: 241-243
[2706] Wada et al. (1997) Science 277: 1113-1116
[2707] Wada et. al. (2002) Development 129: 5409-5419
[2708] Wahl and Berger (1987) Methods Enzymol. 152: 399-407
[2709] Wan and Lemeaux (1994) Plant Physiol. 104: 37-48
[2710] Wang et al. (1997) Plant Cell 9: 491-507
[2711] Wang (1998) Plant J. 16: 515-522
[2712] Wanner and Gruissem (1991) Plant Cell 3: 1289-1303
[2713] Waterhouse et al. (2001) Trends Plant Sci. 6: 297-301
[2714] Waterston et al. (2002) Nature 420: 520-562
[2715] Weeks et al. (1993) Plant Physiol. 102:1077-1084
[2716] Weigel et al. (1992) Cell 69: 843-859
[2717] Weigel (1995) Plant Cell 7: 388-389
[2718] Weigel et al. (2000) Plant Physiol. 122: 1003-1013
[2719] Weigel and Nilsson (1995) Nature 377: 482-500
[2720] Weissbach and Weissbach (1989) Methods for Plant Molecular Biology, Academic Press
[2721] Wendler et al. (1997) J. Biol. Chem. 272: 8482-8489
[2722] Wesley et al. (2001) Plant J. 27: 581-590
[2723] West et al. (1994) Plant Cell 6: 1731-1745
[2724] Westhoff and Gowik (2004) Ann. Bot. (London) 93: 13-23
[2725] Windhovel (2001) Plant Mol. Biol. 45: 201-214.
[2726] Wobus and Weber (1999) Curr. Opin. Plant Biol. 2: 33-38
[2727] Wolberger et al. (1991) Cell 67: 517-528
[2728] Wrather and Sweets (2004) Aflatoxin in Corn. http://aes.missouri.edu/delta/croppest/aflacorn.stm
[2729] Wu et al. (1996) Plant Cell 8: 617-627
[2730] Xin and Browse (1998) Proc. Natl. Acad. Sci. USA 95: 7799-7804
[2731] Xing et al. (1993) EMBO J. 12: 4647-4655
[2732] Xiong et al. (2001a) Genes Dev. 15: 1971-1984.
[2733] Xiong and Zhu (2002) Plant Cell Environ. 25: 131-139.
[2734] Xiong and Yang (2003) Plant Cell 15: 745-759.
[2735] Xu et al. (1996) Plant Physiol. 110: 249-257
[2736] Xu et al. (2001) Proc. Natl. Acad. Sci. USA 98: 15089-15094
[2737] Yamada et al. (1999a) FEBS Lett. 460: 41-45
[2738] Yamada et al. (1999b) Biochem. Biophys. Res. Commun. 261: 614-621
[2739] Yamada et al. (2003) Biochem J. 373: 167-178
[2740] Yamaguchi-Shinozaki and Shinozaki (1993) Mol. Gen. Genet. 236: 331-340
[2741] Yamasaki et al. (2005) Plant Cell 17: 944-956
[2742] Yang et al. (1999) Plant J. 18: 141-149
[2743] Yi et al. (2004) Plant Physiol. 136: 2862-2874
[2744] Yu et al. (2001) Plant Cell 13: 1527-1540
[2745] Yun et al. (2003) J. Biol. Chem. 278: 36966-36972
[2746] Zhang et al. (1991) Bio/Technology 9: 996-997
[2747] Zhang et al. (2002) Planta 215:: 191-194
[2748] Zhang et al. (2003) Development 130: 4859-4869
[2749] Zhang and Wang (2005) BMC Evol. Biol. 5:1
[2750] Zhong and Ye (2001) Plant Phys. 126: 549-563
[2751] Zhou et al. (1995a) Nature 376: 771-774
[2752] Zhou et al. (1995b) Cell 83: 925-935
[2753] Zhou et al. (1997) EMBO J. 16: 3207-3218
[2754] Zhou and Lee (1998) J. Natl. Cancer Inst. 90: 381-388
[2755] Zhu et al. (1998) Plant Cell 10: 1181-1191
[2756] Zou et al. (2004) J. Biol. Chem. 279: 55770-5577

[2757] All publications and patent applications mentioned in this specification are herein incorporated by reference to the same extent as if each individual publication or patent application was specifically and individually indicated to be incorporated by reference.

[2758] The present invention is not limited by the specific embodiments described herein. The invention now being fully described, it will be apparent to one of ordinary skill in the art that many changes and modifications can be made thereto without departing from the spirit or scope of the appended claims. Modifications that become apparent from the foregoing description and accompanying figures fall within the scope of the claims.

1: A transgenic plant transformed with an expression vector comprising a polynucleotide encoding a transcription factor polypeptide;
wherein the transcription factor polypeptide is an AP2/ERF transcription factor comprising an AP2 domain and a VAHD subsequence, and the AP2 domain is at least 68% identical to amino acid coordinates 10-75 of SEQ ID NO: 174;
wherein the expression vector further comprises a stress-inducible promoter operably linked to the polynucleotide; and
wherein the transgenic plant is more tolerant to water deprivation stress than a control plant.

2: The transgenic plant of claim 1, wherein the AP2 domain is at least 79% identical to amino acid coordinates 10-75 of SEQ ID NO: 174.

3: The transgenic plant of claim 1, wherein the stress-inducible promoter comprises SEQ ID NO: 937.

4: A method for producing a transgenic plant that is more tolerant to water deprivation stress than a control plant, said method comprising the steps of:
transforming a target plant with an expression vector comprising a polynucleotide encoding a transcription factor polypeptide;
wherein the transcription factor polypeptide is an AP2/ERF transcription factor comprising an AP2 domain and a VAHD subsequence, and the AP2 domain is at least 68% identical to amino acid coordinates 10-75 of SEQ ID NO: 174; and
wherein the expression vector further comprises a stress-inducible promoter operably linked to the polynucleotide.

5: A transgenic plant transformed with an expression vector comprising a polynucleotide encoding a transcription factor polypeptide;
wherein the transcription factor polypeptide comprises a bHLH domain that is at least 76% identical to amino acid coordinates 307-365 of SEQ ID NO: 292;
wherein the expression vector further comprises a root tissue-specific promoter operably linked to the polynucleotide; and
wherein the transgenic plant flowers earlier than a control plant.

6: The transgenic plant of claim 5, wherein the bHLH domain is at least 88% identical to amino acid coordinates 307-365 of SEQ ID NO: 292.

7: The transgenic plant of claim 5, wherein the root tissue-specific promoter comprises SEQ ID NO: 934.

8: A method for producing a transgenic plant that flowers earlier than a control plant, said method comprising the steps of:
transforming a target plant with an expression vector comprising a polynucleotide encoding a transcription factor polypeptide;
wherein the transcription factor polypeptide comprises a bHLH domain that is at least 76% identical to amino acid coordinates 307-365 of SEQ ID NO: 292;
wherein the expression vector further comprises a root tissue-specific promoter operably linked to the polynucleotide.

9: A transgenic plant transformed with an expression vector comprising a polynucleotide encoding a transcription factor polypeptide;
wherein the transcription factor polypeptide comprises a Myb-related domain that is at least 61% identical to amino acid coordinates 33-77 of SEQ ID NO: 60;
wherein the expression vector further comprises an epidermal tissue-specific promoter operably linked to the polynucleotide; and
wherein the transgenic plant is more tolerant to low nitrogen conditions, osmotic stress or water deprivation than a control plant.

10: The transgenic plant of claim 9, wherein the bHLH domain is at least 70% identical to amino acid coordinates 33-77 of SEQ ID NO: 60.

11: The transgenic plant of claim 9, wherein the epidermal-tissue specific promoter comprises SEQ ID NO: 928 or SEQ ID NO: 933.

12: A method for producing a transgenic plant that is more tolerant to low nitrogen conditions, osmotic stress or water deprivation than a control plant, said method comprising the steps of:
transforming a target plant with an expression vector comprising a polynucleotide encoding a transcription factor polypeptide;
wherein the transcription factor polypeptide comprises a Myb-related domain that is at least 61% identical to amino acid coordinates 33-77 of SEQ ID NO: 60;
wherein the expression vector further comprises a vascular tissue-specific promoter operably linked to the polynucleotide.

13: A transgenic plant transformed with an expression vector comprising a polynucleotide encoding a transcription factor polypeptide;
wherein the transcription factor polypeptide comprises an AT-hook domain that is least 78% identical to amino acid coordinates 63-71 of SEQ ID NO: 114 and a second conserved domain that is least 65% identical to amino acid coordinates 107-204 of SEQ ID NO: 114;
wherein the expression vector further comprises a meristem- or epidermal tissue-specific promoter operably linked to the polynucleotide; and
wherein the transgenic plant is more tolerant to osmotic stress or water deprivation, or has greater biomass, than a control plant.

14: The transgenic plant of claim 13, wherein the second conserved domain is at least 71% identical to amino acid coordinates 107-204 of SEQ ID NO: 114.

15: The transgenic plant of claim 13, wherein the meristem tissue-specific or epidermal tissue-specific promoter comprises SEQ ID NO: 930, SEQ ID NO: 933, or SEQ ID NO: 935.

16: A method for producing a transgenic plant that is more tolerant to osmotic stress or water deprivation than a control plant, or has greater biomass than a control plant, said method comprising the steps of:
transforming a target plant with an expression vector comprising a polynucleotide encoding a transcription factor polypeptide;
wherein the transcription factor polypeptide comprises an AT-hook domain that is least 78% identical to amino acid coordinates 63-71 of SEQ ID NO: 114 and a second conserved domain that is least 65% identical to amino acid coordinates 107-204 of SEQ ID NO: 114;
wherein the expression vector further comprises a meristem- or epidermal tissue-specific promoter operably linked to the polynucleotide.

17: A transgenic plant transformed with an expression vector comprising a polynucleotide;
wherein the polynucleotide encodes a first polypeptide comprising an AT-hook domain that is least 78% identical to amino acid coordinates 63-71 of SEQ ID NO: 114 and a second conserved domain that is least 65% identical to amino acid coordinates 107-204 of SEQ ID NO: 114; and
the polynucleotide also encodes a second polypeptide comprising a B domain that is least 81% identical to amino acid coordinates 20-110 of SEQ ID NO: 2; and
wherein the transgenic plant is later flowering and/or has greater biomass than a control plant.

18: The transgenic plant of claim 17, wherein the first polypeptide comprises SEQ ID NO: 114.

19: The transgenic plant of claim 17, wherein the second polypeptide comprises SEQ ID NO: 2.

20. (canceled)

21: A plant comprising a DNA construct encoding a polypeptide;
(a) wherein the polypeptide has a percent identity with a sequence selected from the group consisting of SEQ ID NO: 2, 4, 6, 8, 10, 12, 14, 16, 18, 20, 22, 24, 26, 28, 30, 32, 34, 36, 38, 40, 42, 44, 46, 48, 50, 52, 54, 56, 58, 60, 62, 64, 66, 68, 70, 72, 74, 76, 78, 80, 82, 84, 86, 88, 90, 92, 94, 96, 98, 100, 102, 104, 106, 108, 110, 112, 114, 116, 118, 120, 122, 124, 126, 128, 130, 132, 134, 136, 138, 140, 142, 144, 146, 148, 150, 152, 154, 156, 158, 160, 162, 164, 166, 168, 170, 172, 174, 176, 178, 180, 182, 184, 186, 188, 190, 192, 194, 196, 198, 200, 202, 204, 206, 208, 210, 212, 214, 216, 218, 220, 222, 224, 226, 228, 230, 232, 234, 236, 238, 240, 242, 244, 246, 248, 250, 252, 254, 256, 258, 260, 262, 264, 266, 268, 270, 272, 274, 276, 278, 280, 282, 284, 286, 288, 290, 292, 294, 296, 298, 300, 302, 304, 306, 308, 310, 312, 314, 316, 318, 320, 322, 324, 326, 328, 330, 332, 334, 336, 338, 340, 342, 344, 346, 348, 350, 352, 354, 356, 358, 360, 362, 364, 366, 368, 370, 372, 374, 376, 378, 380, 382, 384, 386, 388, 390, 392, 394, 396, 398, 400, 402, 404, 406, 408, 410, 412, 414, 416, 418, and 420; and
(b) wherein the polypeptide shares a percent identity with a sequence of (a), or comprises a conserved domain sharing the percent identity with the sequence of (a);
wherein the percent identity is selected from the group consisting of at least 55%, at least 56%, at least 62%, at least 63%, at least 64%, at least 65%, at least 66%, at least 67%, at least 68%, at least 69%, at least 70%, at least 71%, at least 72%, at least 73%, at least 74%, at least 75%, at least 76%, at least 77%, at least 78%, at least 79%, at least 80%, at least 81%, at least 82%, at least 83%, at least 84%, at least 85%, at least 86%, at least 87%, at least 88%, at least 89%, at least 90%, at least 91%, at least 93%, at least 95%, at least 96%, at least 98%, and 100%;
wherein when the polypeptide is expressed in the plant, said expression confers to the plant a trait that is altered with respect to a control plant;
wherein said trait is selected from the group consisting: altered C/N sensing, altered leaf orientation, upward pointing cotyledons, altered leaf shape, altered leaf shape, broad leaves at later stages, altered root branching, dark green leaf color, decreased ABA sensitivity, decreased anthocyanin, decreased tolerance to NaCl, decreased trichome density, early flowering, glossy leaves, gray leaf color, increased biomass, increased chlorophyll, increased resistance to Botrytis, increased resistance to Erysiphe, increased resistance to Sclerotinia, increased root hair, increased root mass, increased seed number, increased seedling size, increased starch, increased tolerance to cold, increased tolerance to dehydration, increased tolerance to drought, increased tolerance to heat, increased tolerance to hyperosmotic stress, increased tolerance to low nitrogen conditions, increased tolerance to mannitol, increased tolerance to NaCl, increased tolerance to sucrose, increased tolerance to sucrose and mannitol, increased tolerance to sugar, decreased apical dominance, large flower, large leaf size, late flowering, late senescence, pale seed color, photosynthesis rate increased, thicker stem, and trilocular siliques.

The application's sequence listing, which the Patent Office published only in electronic form, follows.

SEQUENCE LISTING (938 sequences)

SEQ ID NO: 1 - DNA, 832 bp, Arabidopsis thaliana
  G481
gagcgtttcgtagaaaaattcgatttctctaaagccctaaaactaaaacgactatccccaattccaagttctagggtttccatcttccccaatctagtataaatggcggatacgccttcgagcccagctggagatggcggagaaagcggcggttccgttagggagcaggatcgataccttcctatagctaatatcagcaggatcatgaagaaagcgttgcctcctaatggtaagattggaaaagatgctaaggatacagttcaggaatgcgtctctgagttcatcagcttcatcactagcgaggccagtgataagtgtcaaaaagagaaaaggaaaactgtgaatggtgatgatttgttgtgggcaatggcaacattaggatttgaggattacctggaacctctaaagatatacctagcgaggtacagggagttggagggtgataataagggatcaggaaagagtggagatggatcaaatagagatgctggtggcggtgtttctggtgaagaaatgccgagctggtaaaagaagttgcaagtagtgattaagaacaatcgccaaatgatcaagggaaattagagatcagtgagttgtttatagttgagctgatcgacaactatttcgggtttactctcaatttcggttatgttagtttgaacgtttggtttattgtttccggtttagttggttgtatttaaagatttctctgttagatgttgagaacacttgaatgaaggaaaaatttgtccacatcctgttgttattttcgattcactttcggaatttcatagctaatttattctcatttaataccaaatccttaaattaa

SEQ ID NO: 2 - protein, 141 aa, Arabidopsis thaliana
  G481
MADTPSSPAGDGGESGGSVREQDRYLPIANISRIMKKALPPNGKIGKDAKDTVQECVSEFISFITSEASDKCQKEKRKTVNGDDLLWAMATLGFEDYLEPLKIYLARYRELEGDNKGSGKSGDGSNRDAGGGVSGEEMPSW

SEQ ID NO: 3 - DNA, 555 bp, Glycine max
  G3470
tcaccgggtttgtgagatgtcggatgcaccggcgagtccgagtcacgagagtggtggcgagcagagccctcgcggctcgttgtccggcgcggctagagagcaggaccggtaccttcccattgccaacatcagccgcatcatgaagaaggctctgcctcccaatggcaagattgcgaaggatgcaaaagacacaatgcaagaatgcgtttctgaattcatcagcttcattaccagcgaggcgagtgagaaatgccagaaggagaagagaaagacaatcaatggagacgatttactatgggccatggcaactttagggtttgaagactacattgagccgcttaaggtgtacctggctaggtacagagaggcggagggtgacactaaaggatctgctagaagtggtgatggatctgctagaccagatcaagttggccttgcaggtcaaaatgctcagcttgttcatcagggttcgctgaactatattggtttgcaggtgcaaccacaacatctggttatgccttcaatgcaaggccatgaatagtttagatgcttcta

SEQ ID NO: 4 - protein, 174 aa, Glycine max
  G3470
MSDAPASPSHESGGEQSPRGSLSGAAREQDRYLPIANISRIMKKALPPNGKIAKDAKDTMQECVSEFISFITSEASEKCQKEKRKTINGDDLLWAMATLGFEDYIEPLKVYLARYREAEGDTKGSARSGDGSARPDQVGLAGQNAQLVHQGSLNYIGLQVQPQHLVMPSMQGHE

SEQ ID NO: 5 - DNA, 556 bp, Glycine max
  G3471
gtagggtttgtgagatgtcggatgcgccaccgagcccgactcatgagagtgggggcgagcagagcccgcgcggttcgtcgtccggcgcgagggagcaggaccggtacctcccgattgccaacatcagccgcattatgaagaaggctctgcctcccaacggcaagattgcaaaggatgccaaagacaccatgcaggaatgcgtttctgagttcatcagcttcattaccagcgaggcgagtgagaaatgccagaaggagaagagaaagacaatcaatggagacgatttgctatgggccatggccactttaggatttgaagactacatagagccgcttaaggtgtacctggctaggtacagagaggcggagggtgacactaaaggatctgctagaagtggtgatggatctgctacaccagatcaagttggccttgcaggtcaaaattctcagcttgttcatcagggttcgctgaactatattggtttgcaggtgcaaccacaacatctggttatgccttcaatgcaaagccatgaatagtttagatgcttctacgcatc

SEQ ID NO: 6 - protein, 173 aa, Glycine max
  G3471
MSDAPPSPTHESGGEQSPRGSSSGAREQDRYLPIANISRIMKKALPPNGKIAKDAKDTMQECVSEFISFITSEASEKCQKEKRKTINGDDLLWAMATLGFEDYIEPLKVYLARYREAEGDTKGSARSGDGSATPDQVGLAGQNSQLVHQGSLNYIGLQVQPQHLVMPSMQSHE

SEQ ID NO: 7 - DNA, 557 bp, Zea mays
  G3876
tataagtgcaggaggagctcatggcggaagctccggcgagccctggcggcggcggcgggagccacgagagcgggagccccaggggaggcggaggcggtggcagcgtcagggagcaggacaggttcctgcccatcgccaacatcagtcgcatcatgaagaaggccatcccggctaacgggaagatcgccaaggacgctaaggagaccgtgcaggagtgcgtctccgagttcatctccttcatcactagcgaagcgagtgacaagtgccagagggagaagcggaagaccatcaatggcgacgatctgctgtgggccatggccacgctggggtttgaagactacattgaacccctcaaggtgtacctgcagaagtacagagagatggagggtgatagcaagttaactgcaaaatctagcgatggctcaattaaaaaggatgcccttggtcatgtgggagcaagtagctcagctgcacaagggatgggccaacagggagcatacaaccaaggaatgggttatatgcaaccccagtaccataacggggatatctcaaactaa

SEQ ID NO: 8 - protein, 178 aa, Zea mays
  G3876
MAEAPASPGGGGGSHESGSPRGGGGGGSVREQDRFLPIANISRIMKKAIPANGKIAKDAKETVQECVSEFISFITSEASDKCQREKRKTINGDDLLWAMATLGFEDYIEPLKVYLQKYREMEGDSKLTAKSSDGSIKKDALGHVGASSSAAQGMGQQGAYNQGMGYMQPQYHNGDISN

SEQ ID NO: 9 - DNA, 1231 bp, Oryza sativa (indica cultivar-group)
  G3394
ggccgcttctcttctccagcgtccgatctccccctctcgcctctccgcctcacctccgctccgcttcccacccccgcttcctctctctctcctctccccccccctctctctctctctctctctctctctctcctcctcgcttcaccacctcgcgcccaacccccctctctctcctctccacgtcgcgccctctccgcgcgcgcccgcgcttctatataaggaggggggaggtgggatggcggatgggccggggagcccggggggaggaggggggagccacgagagcgggagcccgagggggggagggggaggagggggaggtgggggtggggggggcccactcgtccggcaggacaggttcctccccatcgccaacatcagccgcatcatgaagaaggccatcccggccaacgggaagatcgccaaggacgccaaggagaccgtgcaggagtgcgtctccgagttcatctccttcatcaccagcgaggcgagcgataaatgccagagggagaagcgcaagaccatcaacggcgacgacttgctgtgggcgatggccacgctgggcttcgaggactacatcgagcccctcaaggtctacctgcagaagtacagagagatggagggtgatagtaaattaactgcaaaggctggtgatggctctgtgaaaaaggatgtacttggttctcatggaggaagcagttcaagtgcccaagggatgggccaacaagcagcatacaatcaaggaatgggttatatgcaacctcagtaccataatggggatgtctcaaactgaagataggaccttttcatgcaactgttgctaggtggattttatttggtgctgcagtcgttagctaatatatatacctacacctcatggtgagcagtgaaggaagtaacttgctaccacctctaggtcccatgtttgtcaaccaggaactgatgctgcttggaagcgtcgagccaaggctgcttctcagatgtaaattactccccgtgaggatagtttcggttcgtggtctagctctgttgttgtatgtatattcaggataatttaacaattggtctttggctgtcattcggttccatataatctgtattgggaggcataaatattcatgttgtatttcgtcctgaactagcgtgttgtactattgagaaatagatgctctctgtaatggtagcaattttactctgattcccaaaaaaaaaaaaaaaaaaaaaaaaaaaa

SEQ ID NO: 10 - protein, 185 aa, Oryza sativa (indica cultivar-group)
  G3394
MADGPGSPGGGGGSHESGSPRGGGGGGGGGGGGGPLVRQDRFLPIANISRIMKKAIPANGKIAKDAKETVQECVSEFISFITSEASDKCQREKRKTINGDDLLWAMATLGFEDYIEPLKVYLQKYREMEGDSKLTAKAGDGSVKKDVLGSHGGSSSSAQGMGQQAAYNQGMGYMQPQYHNGDVSN

SEQ ID NO: 11 - DNA, 819 bp, Zea mays
  G3434
tcgacaagggttgcggcggaggcgcccggtcgctggcgatggccgacgacggcgggagccacgagggcagcggcggcggcggaggcgtccgggagcaggaccggttcctgcccatcgccaacatcagccggatcatgaagaaggccgtcccggccaacggcaagatcgccaaggacgctaaggagaccctgcaggagtgcgtctccgagttcatatcattcgtgaccagcgaggccagcgacaaatgccagaaggagaaacgaaagacaatcaacggggacgatttgctctgggcgatggccactttaggattcgaggagtacgtcgagcctctcaagatttacctacaaaagtacaaagagatggagggtgatagcaagctgtctacaaaggctggcgagggctctgtaaagaaggatgcaattagtccccatggtggcaccagtagctcaagtaatcagttggttcagcatggagtctacaaccaagggatgggctatatgcagccacagtaccacaatggggaaacctaacaaagggctaatacagcagcaatttatgctagggaagtctctgcattgcttaccatgtgtattggcagaaaacaggaggcacttacaaagggtgttaatctctgcgatggctgcctctcaggtgtaaattggcttcggtttagcgctgcttttgtccgtatatttaggatgatttgactgttgctacttttggcaaccttttacatttacagatatgtattattcagcataaatataatatagtagtcctaggcctaaataatggtgattaaaaaaaaaaaaaaaa

SEQ ID NO: 12 - protein, 164 aa, Zea mays
  G3434
MADDGGSHEGSGGGGGVREQDRFLPIANISRIMKKAVPANGKIAKDAKETLQECVSEFISFVTSEASDKCQKEKRKTINGDDLLWAMATLGFEEYVEPLKIYLQKYKEMEGDSKLSTKAGEGSVKKDAISPHGGTSSSSNQLVQHGVYNQGMGYMQPQYHNGET

SEQ ID NO: 13 - DNA, 823 bp, Arabidopsis thaliana
  G1364
ctcttctctcgatctctctccctctctgcctcctctcttcctccaatcaacaaacacctctctgtttcactcccgccctttttcgaattcttctgatggcggagtcgcaggccaagagtcccggaggctgtggaagccatgagagtggtggagatcaaagtcccaggtcgttacatgttcgtgagcaagataggtttcttccgattgctaacataagccgtatcatgaaaagaggtcttcctgctaatgggaaaatcgctaaagatgctaaggagattgtgcaggaatgtgtctctgaattcatcagtttcgtcaccagcgaagcgagtgataaatgtcaaagagagaaaaggaagactattaatggagatgatttgctttgggcaatggctactttaggatttgaagactacatggaacctctcaaggtttacctgatgagatatagagagatggagggtgacacaaagggatcagcaaaaggtggggatccaaatgcaaagaaagatgggcaatcaagccaaaatggccagttctcgcagcttgctcaccaaggtccttatgggaactctcaagctcagcagcatatgatggttccaatgccgggaacagactagtatgagaggagtattcaactttggttatgttccaccaaaagaggttatcttatctgtatattatttgtgttgtaagagttttgctatgcagaacttgtgactataatcatctcattgttttgttttgtttttgtttccttggatttgttctgaatatgtcatcaagtcagtcagtctatttatatatttggtttgttgattatttc

SEQ ID NO: 14 - protein, 173 aa, Arabidopsis thaliana
  G1364
MAESQAKSPGGCGSHESGGDQSPRSLHVREQDRFLPIANISRIMKRGLPANGKIAKDAKEIVQECVSEFISFVTSEASDKCQREKRKTINGDDLLWAMATLGFEDYMEPLKVYLMRYREMEGDTKGSAKGGDPNAKKDGQSSQNGQFSQLAHQGPYGNSQAQQHMMVPMPGTD

SEQ ID NO: 15 - DNA, 600 bp, Glycine max
  G3475
tcgattatccgtttgtcgatggcggactcggacaacgactccggcggcgcgcacaacgccgggaaggggagcgagatgtcgccgcgggagcaggaccggttcctgccgatcgcgaacgtgagccgcatcatgaagaaggcgctgccggcgaacgcgaagatctcgaaggacgcgaaggagacggtgcaggagtgcgtgtcggagttcatcagcttcatcaccggcgaggcctccgacaagtgccagcgggagaagcgcaagacgatcaacggcgacgacctgctctgggcgatgaccactctcggcttcgaggactacgtcgagcctctcaagggctacctccagcgcttccgagaaatggaaggagagaagacagtggcggcgcgtgacaaggacgcgcctcctcctaccaatgctaccaacagtgcctacgagagtcctagttatgctgctgctcctggtggaatcatgatgcatcagggacacgtgtacggttctgccggcttccatcaagtggctggtggtgctataaagggtgggcctgtttatcccgggcctggatccaatgccggtaggcccaggtagatgggcctatgttat

SEQ ID NO: 16 - protein, 188 aa, Glycine max
  G3475
MADSDNDSGGAHNAGKGSEMSPREQDRFLPIANVSRIMKKALPANAKISKDAKETVQECVSEFISFITGEASDKCQREKRKTINGDDLLWAMTTLGFEDYVEPLKGYLQRFREMEGEKTVAARDKDAPPPTNATNSAYESPSYAAAPGGIMMHQGHVYGSAGFHQVAGGAIKGGPVYPGPGSNAGRPR

SEQ ID NO: 17 - DNA, 684 bp, Arabidopsis thaliana
  G485
cctctctgatccaacggacccaaaacatctatctctctttctcgaccttttgtctcctcgatctaaagatggcggattcggacaacgattcaggaggacacaaagacggtggaaatgcttcgacacgtgagcaagataggtttctaccgatcgctaacgttagcaggatcatgaagaaagcacttcctgcgaacgcaaaaatctctaaggatgctaaagaaacggttcaagagtgtgtatcggaattcataagtttcatcaccggtgaggcttctgacaagtgtcagagagagaagaggaagacaatcaacggtgacgatcttctttgggcgatgactacgctagggtttgaggactacgtggagcctctcaaggtttatctgcaaaagtatagggaggtggaaggagagaagactactacggcagggagacaaggcgataaggaaggtggaggaggaggcggtggagctggaagtggaagtggaggagctccgatgtacggtggtggcatggtgactacgatgggacatcaattttcccatcatttttcttaattgtaaaatgataaaagcaaattttcatttttattaattaatgatatatatatatatatgtttaacttttagtataatgtttacagaattttttttttaaaactaggttcaacccactaacgtaacagcg

SEQ ID NO: 18 - protein, 161 aa, Arabidopsis thaliana
  G485
MADSDNDSGGHKDGGNASTREQDRFLPIANVSRIMKKALPANAKISKDAKETVQECVSEFISFITGEASDKCQREKRKTINGDDLLWAMTTLGFEDYVEPLKVYLQKYREVEGEKTTTAGRQGDKEGGGGGGGAGSGSGGAPMYGGGMVTTMGHQFSHHFS

SEQ ID NO: 19 - DNA, 528 bp, Glycine max
  G3476
ggattgattgtgaagatggctgagtcggacaacgactcgggaggggcgcagaacgcgggaaacagtggaaacttgagcgagttgtcgcctcgggaacaggaccggtttctccccatagcgaacgtgagcaggatcatgaagaaggccttgccggcgaacgcgaagatctcgaaggacgcgaaggagacggtgcaggaatgcgtgtcggagttcatcagcttcataacgggtgaggcgtcggacaagtgccagagggagaagcgcaagaccatcaacggcgacgatcttctctgggccatgacaaccctgggattcgaagagtacgtggagcctctgaagatttacctccagcgcttccgcgagatggagggagagaagaccgtggccgcccgcgactcttctaaggactcggcctccgcctcctcctatcatcagggacacgtgtacggctcccctgcctaccatcatcaagtgcctgggcccacttatcctgcccctggtagacccagatgacgtgctcctctattc

SEQ ID NO: 20 - protein, 165 aa, Glycine max
  G3476
MAESDNDSGGAQNAGNSGNLSELSPREQDRFLPIANVSRIMKKALPANAKISKDAKETVQECVSEFISFITGEASDKCQREKRKTINGDDLLWAMTTLGFEEYVEPLKIYLQRFREMEGEKTVAARDSSKDSASASSYHQGHVYGSPAYHHQVPGPTYPAPGRPR

SEQ ID NO: 21 - DNA, 896 bp, Arabidopsis thaliana
  G2345
agatcagatcaaatctctctctccatctccgtctcctcctccaatcatcatttctctctccgtctcccgctctttttcgaattctccttcttcttcagggtttctgagatggccgaatcgcaaaccggtggtggtggtggtggaagccatgagagtggcggtgatcagagcccgaggtctttgaatgttcgtgagcaggacaggtttcttccgattgctaacataagccgtatcatgaagagaggtttacctctaaatggcaaaatcgctaaagatgctaaagagactatgcaggaatgtgtctctgaattcatcagcttcgtcaccagcgaggctagtgataagtgccaaagagagaaaaggaagaccatcaatggagatgatttgctttgggctatggccactttaggattcgaagattacatcgatcccctcaaggtttacctgatgcgatatagagagatggagggtgacactaaaggatcaggaaaaggcggggaatcgagtgcaaagagagatggtcaaccaagccaagtgtctcagttctcgcaggttcctcaacaaggctcattctcacagggtccttatggaaactctcaaggttcgaatatgatggttcaaatgccgggcacagagtagtactaggacactattcatcacaatcttccgagactcgactatgcctgttgtgtctgagaatctgagtgatccactttccatagatatggattgtggtatctcagtttttgggagagagaagatttgtatatgattgtgttgtagggagaagagtttggtttgcttatgataagaattgaaaagcaccttttttttcttttgactgttatgtttcttaggttttggtcttaagcagaagctatttaccaaaaaaaaaa

SEQ ID NO: 22 - protein, 176 aa, Arabidopsis thaliana
  G2345
MAESQTGGGGGGSHESGGDQSPRSLNVREQDRFLPIANISRIMKRGLPLNGKIAKDAKETMQECVSEFISFVTSEASDKCQREKRKTINGDDLLWAMATLGFEDYIDPLKVYLMRYREMEGDTKGSGKGGESSAKRDGQPSQVSQFSQVPQQGSFSQGPYGNSQGSNMMVQMPGTE

SEQ ID NO: 23 - DNA, 553 bp, Glycine max
  G3474
gatatccatggctgagtccgacaacgagtcaggaggtcacacggggaacgcgagcgggagcaacgagttgtccggttgcagggagcaagacaggttcctcccaatagcaaacgtgagcaggatcatgaagaaggcgttgccggcgaacgcgaagatatcgaaggaggcgaaggagacggtgcaggagtgcgtgtcggagttcatcagcttcataacaggagaggcttccgataagtgccagaaggagaagaggaagacgatcaacggcgacgatcttctctgggccatgactaccctgggcttcgaggactacgtggatcctctcaagatttacctgcacaagtatagggagatggagggggagaaaaccgctatgatgggaaggccacatgagagggatgagggttatggccatggccatggtcatgcaactcctatgatgacgatgatgatggggcatcagccccagcaccagcaccagcaccagcaccagggacacgtgtatggatctggatcagcatcttctgcaagaactagatagcatgtgtcatct

SEQ ID NO: 24 - protein, 177 aa, Glycine max
  G3474
MAESDNESGGHTGNASGSNELSGCREQDRFLPIANVSRIMKKALPANAKISKEAKETVQECVSEFISFITGEASDKCQKEKRKTINGDDLLWAMTTLGFEDYVDPLKIYLHKYREMEGEKTAMMGRPHERDEGYGHGHGHATPMMTMMMGHQPQHQHQHQHQGHVYGSGSASSARTR

SEQ ID NO: 25 - DNA, 602 bp, Glycine max
  G3478
ttccgttagtcgatggcggactccgacaacgactccggcggcgcgcacaacggcggcaaggggagcgagatgtcgccgcgggagcaggaccggtttctcccgatcgcgaacgtgagccgcatcatgaagaaggcgctgccggcgaacgcgaagatctcgaaggacgcgaaggagacggtgcaggagtgcgtgtcagagttcatcagcttcatcaccggcgaggcctccgacaagtgccagcgcgagaagcgcaagacgatcaacggcgacgacctgctctgggcgatgaccactctgggcttcgaggactacgtggagcctctcaaaggctacctccagcgcttccgagaaatggaaggagagaagaccgtggcggcgcgtgacaaggacgcgcctcctcttacgaatgctaccaacagtgcctacgagagtgctaattatgctgctgctgctgctgttcctggtggaatcatgatgcatcagggacacgtgtacggttctgccggcttccatcaagtggctggcggggctataaagggtgggcctgcttatcctgggcctggatccaatgccggtaggcccagataaagagcctattatta

SEQ ID NO: 26 - protein, 191 aa, Glycine max
  G3478
MADSDNDSGGAHNGGKGSEMSPREQDRFLPIANVSRIMKKALPANAKISKDAKETVQECVSEFISFITGEASDKCQREKRKTINGDDLLWAMTTLGFEDYVEPLKGYLQRFREMEGEKTVAARDKDAPPLTNATNSAYESANYAAAAAVPGGIMMHQGHVYGSAGFHQVAGGAIKGGPAYPGPGSNAGRPR

SEQ ID NO: 27 - DNA, 1065 bp, Arabidopsis thaliana
  G482
tcgacccacgcgtccggacacttaacaattcacaccttctctttttactcttcctaaaaccctaaatttcctcgcttcagtcttcccactcaagtcaaccaccaattgaattcgatttcgaatcattgatggaaatgatttgaaaaaagagtaaagtttatttttttattccttgtaattttcagaaatgggggattccgacagggattccggtggagggcaaaacgggaacaaccagaacggacagtcctccttgtctccaagagagcaagacaggttcttgccgatcgctaacgtcagccggatcatgaagaaggccttgcccgccaacgccaagatctctaaagatgccaaagagacgatgcaggagtgtgtctccgagttcatcagcttcgtcaccggagaagcatctgataagtgtcagaaggagaagaggaagacgatcaacggagacgatttgctctgggctatgactactctaggttttgaggattatgttgagccattgaaagtttacttgcagaggtttagggagatcgaaggggagaggactggactagggaggccacagactggtggtgaggtcggagagcatcagagagatgctgtcggagatggcggtgggttctacggtggtggtggtgggatgcagtatcaccaacatcatcagtttcttcaccagcagaaccatatgtatggagccacaggtggcggtagcgacagtggaggtggagctgcctccggtaggacaaggacttaacaaagattggtgaagtggatctctctctgtatatagatacataaatacatgtatacacatgcctatttttacgacccatataaggtatctatcatgtgatagaacgaacattggtgttggtgatgtaaaatcagatgtgcattaagggtttagattttgaggctgtgtaaaagaagatcaagtgtgctttgttggacaataggattcactaacgaatctgcttcattggatcttgtatgtaactaaagccattgtattgaatgcaaatgttttcatttgggatgctttaaaaaaaaaaaaaaaaa

SEQ ID NO: 28 - protein, 190 aa, Arabidopsis thaliana
  G482
MGDSDRDSGGGQNGNNQNGQSSLSPREQDRFLPIANVSRIMKKALPANAKISKDAKETMQECVSEFISFVTGEASDKCQKEKRKTINGDDLLWAMTTLGFEDYVEPLKVYLQRFREIEGERTGLGRPQTGGEVGEHQRDAVGDGGGFYGGGGGMQYHQHHQFLHQQNHMYGATGGGSDSGGGAASGRTRT

SEQ ID NO: 29 - DNA, 735 bp, Zea mays
  G3435
cggcggtggccttgagctgaggcggcggagcgatgccggactcggacaacgactccggcgggccgagcaacgccgggggcgagctgtcgtcgccgcgggagcaggaccggttcctgcccatcgccaacgtgagccggatcatgaagaaggcgctcccggccaacgccaagatcagcaaggacgccaaggagacggtgcaggagtgcgtgtccgagttcatctccttcatcaccggcgaggcctccgacaagtgccagcgcgagaagcgcaagaccatcaacggcgacgacctgctgtgggccatgaccacgctcggcttcgaggactacgtcgagccgctcaagcactacctgcacaagttccgcgagatcgagggcgagagggccgccgcgtccgccggcgcctcgggctcgcagcagcagcagcagcagggcgagctgcccagaggcgccgccaatgccgccgggtacgccgggtacggcgcgcctggctccggcggcatgatgatgatgatgatggggcagcccatgtacggcggctcgcagccgcagcaacagccgccgccgcctcagccgccacagcagcagcagcaacatcaacagcatcacatggcaataggaggcagaggaggattcggccaacaaggcggcggcggcggctcctcgtcgtcgtcagggcttggccggcaagacagggcgtgagttgcgacgatacgtcagaatcagaatcgctgat

SEQ ID NO: 30 - protein, 222 aa, Zea mays
  G3435
MPDSDNDSGGPSNAGGELSSPREQDRFLPIANVSRIMKKALPANAKISKDAKETVQECVSEFISFITGEASDKCQREKRKTINGDDLLWAMTTLGFEDYVEPLKHYLHKFREIEGERAAASAGASGSQQQQQQGELPRGAANAAGYAGYGAPGSGGMMMMMMGQPMYGGSQPQQQPPPPQPPQQQQQHQQHHMAIGGRGGFGQQGGGGGSSSSSGLGRQDRA

SEQ ID NO: 31 - DNA, 547 bp, Glycine max
  G3472
taaggctagctagctagccatggctgagtcggacaacgagtccggaggtcacacggggaacgcaagcggaagcaacgaattctccggttgcagggagcaagacaggttccttccgatagcgaacgtgagcaggatcatgaagaaggcgttgccggcgaacgcgaagatctcgaaggaggcgaaggagacggtgcaggagtgcgtgtcggagttcatcagcttcataacaggagaagcgtccgataagtgccagaaggagaagaggaagacgatcaacggcgatgatctgctgtgggccatgaccacgctgggattcgaggagtacgtggagcctctcaaggtttatctgcataagtatagggagctggaaggggagaaaactgctatgatgggaaggccacatgagagggatgagggttatggtcatgcaactcctatgatgatcatgatggggcatcaacagcagcagcatcagggacacgtgtatggatctggaactactactggatcagcatcttctgcaagaactagataacaggtttatgca

SEQ ID NO: 32 - protein, 171 aa, Glycine max
  G3472
MAESDNESGGHTGNASGSNEFSGCREQDRFLPIANVSRIMKKALPANAKISKEAKETVQECVSEFISFITGEASDKCQKEKRKTINGDDLLWAMTTLGFEEYVEPLKVYLHKYRELEGEKTAMMGRPHERDEGYGHATPMMIMMGHQQQQHQGHVYGSGTTTGSASSARTR

SEQ ID NO: 33 - DNA, 803 bp, Zea mays
  G3436
tttgacttgaccggacagtgctgttcggtggctcggccgcgatgccggactccgacaacgagtccggcgggccgagcaacgcggagttctcgtcgccgcgggagcaggaccggttcctgccgatcgcgaacgtgagccggatcatgaagaaggcgctcccggccaacgccaagatctccaaggacgccaaggagacggtgcaggagtgcgtgtcggagttcatctccttcatcaccggcgaggcctccgacaagtgccagcgcgagaagcgcaagaccatcaacggcgacgacctactctgggccatgaccacgctcggcttcgaggactacgtcgagccgctcaagctctacctccacaagttccgcgagctcgagggcgagaaggcggccacgacgagcgcctcctccggcccgcagccgccgctgcacagggagacgacgccgtcgtcgtcaacgcacaatggcgcgggcgggcccgtcgggggatacggcatgtacggcggcgcgggcgggggaagcggtatgatcatgatgatgggacagcccatgtacggcggctccccgccggccgcgtcgtccgggtcgtacccgcaccaccagatggccatgggcggaaaaggtggcgcctatggctacggcggaggctcgtcgtcgtcgccgtcagggctcggcaggtaggacaggttgtgaccgtcgccgtccatgcttgcatggccatggccatggcatggctcccgccgccggcttcttgcttggtgtcggtaattagcgctggtggcctgcgctggttaagttcaccat

SEQ ID NO: 34 - protein, 212 aa, Zea mays
  G3436
MPDSDNESGGPSNAEFSSPREQDRFLPIANVSRIMKKALPANAKISKDAKETVQECVSEFISFITGEASDKCQREKRKTINGDDLLWAMTTLGFEDYVEPLKLYLHKFRELEGEKAATTSASSGPQPPLHRETTPSSSTHNGAGGPVGGYGMYGGAGGGSGMIMMMGQPMYGGSPPAASSGSYPHHQMAMGGKGGAYGYGGGSSSSPSGLGR

SEQ ID NO: 35 - DNA, 720 bp, Oryza sativa (japonica cultivar-group)
  G3397
gcgtctgatttgctgaagaggaggaggaggatgccggactcggacaacgactccggcgggccgagcaactacgcgggaggggagctgtcgtcgccgcgggagcaggacaggttcctgccgatcgcgaacgtgagcaggatcatgaagaaggcgctgccggcgaacgccaagatcagcaaggacgccaaggagacggtgcaggagtgcgtctccgagttcatctccttcatcaccggcgaggcctccgacaagtgccagcgcgagaagcgcaagaccatcaacggcgacgacctgctctgggccatgaccaccctcggcttcgaggactacgtcgaccccctcaagcactacctccacaagttccgcgagatcgagggcgagcgcgccgccgcctccaccaccggcgccggcaccagcgccgcctccaccacgccgccgcagcagcagcacaccgccaatgccgccggcggctacgccgggtacgccgccccgggagccggccccggcggcatgatgatgatgatggggcagcccatgtacggctcgccgccaccgccgccacagcagcagcagcagcaacaccaccacatggcaatgggaggaagaggcggcttcggtcatcatcccggcggcggcggcggcgggtcgtcgtcgtcgtcggggcacggtcggcaaaacaggggcgcttgacatcgctccgagacgagtagcatgcaccat

SEQ ID NO: 36 - protein, 219 aa, Oryza sativa (japonica cultivar-group)
  G3397
MPDSDNDSGGPSNYAGGELSSPREQDRFLPIANVSRIMKKALPANAKISKDAKETVQECVSEFISFITGEASDKCQREKRKTINGDDLLWAMTTLGFEDYVDPLKHYLHKFREIEGERAAASTTGAGTSAASTTPPQQQHTANAAGGYAGYAAPGAGPGGMMMMMGQPMYGSPPPPPQQQQQQHHHMAMGGRGGFGHHPGGGGGGSSSSSGHGRQNRGA

SEQ ID NO: 37 - DNA, 610 bp, Oryza sativa (japonica cultivar-group)
  G3395
tggatctagggtttttggagggcggcgcggggatggcggacgcggggcacgacgagagcgggagcccgccgaggagcggcggggtgagggagcaggacaggttcctgcccatcgccaacatcagccgcatcatgaagaaggccgtcccggcgaacggcaagatcgccaaggacgccaaggagaccctgcaggagtgcgtctcggagttcatctccttcgtcaccagcgaggcgagcgacaaatgtcagaaggagaagcgcaagaccatcaacggggaagatctcctctttgcgatgggtacgcttggctttgaggagtacgttgatccgttgaagatctatttacacaagtacagagagatggagggtgatagtaagctgtcctcaaaggctggtgatggttcagtaaagaaggatacaattggtccgcacagtggcgctagtagctcaagtgcgcaagggatggttggggcttacacccaagggatgggttatatgcaacctcagtatcataatggggacacctaaagatgaggatagtgaaaattttcagtaactggtgtcctctgtgagttattatccatctgttaaggaagaacccacattagggc

SEQ ID NO: 38 - protein, 164 aa, Oryza sativa (japonica cultivar-group)
  G3395
MADAGHDESGSPPRSGGVREQDRFLPIANISRIMKKAVPANGKIAKDAKETLQECVSEFISFVTSEASDKCQKEKRKTINGEDLLFAMGTLGFEEYVDPLKIYLHKYREMEGDSKLSSKAGDGSVKKDTIGPHSGASSSSAQGMVGAYTQGMGYMQPQYHNGDT

SEQ ID NO: 39 - DNA, 761 bp, Oryza sativa (japonica cultivar-group)
  G3398
cctctcctcttcgtcttcctcctcgccttcgcttcgactgcttcgatcgagggagatcgaggttgcgatgccggattcggacaacgagtcaggggggccgagcaacgcgggggagtacgcgtcggcgagggagcaggacaggttcctgccgatcgcgaacgtgagcaggatcatgaagagggcgctcccggcgaacgccaagatcagcaaggacgccaaggagacggtgcaggagtgcgtctcggagttcatctccttcatcaccggcgaggcctccgacaagtgccagcgggagaagcgcaagaccatcaacggcgacgacctcctctgggcgatgaccacgctcggcttcgaggactacatcgacccgctcaagctctacctccacaagttccgcgagctcgagggcgagaaggccatcggcgccgccggcagcggcggcggtggcgccgcctcctccggcggctccggctccggctccggctcgcaccaccaccaggatgcttcccggaacaatggcggatacggcatgtacggcggcggcggcggcatgatcatgatgatgggacagcctatgtacggctcgccgccggcgtcgtcagctgggtacgcgcagccgccgccgccccaccaccaccaccaccagatggtgatgggagggaaaggtgcgtatggccatggcggcggcggcggcggcgggccctccccgtcgtcgggatacggccggcaagacaggctatgagcttgctttcttggttggt

SEQ ID NO: 40 - protein, 224 aa, Oryza sativa (japonica cultivar-group)
  G3398
MPDSDNESGGPSNAGEYASAREQDRFLPIANVSRIMKRALPANAKISKDAKETVQECVSEFISFITGEASDKCQREKRKTINGDDLLWAMTTLGFEDYIDPLKLYLHKFRELEGEKAIGAAGSGGGGAASSGGSGSGSGSHHHQDASRNNGGYGMYGGGGGMIMMMGQPMYGSPPASSAGYAQPPPPHHHHHQMVMGGKGAYGHGGGGGGGPSPSSGYGRQDRL

SEQ ID NO: 41 - DNA, 837 bp, Oryza sativa (japonica cultivar-group)
  G3396
gtcgagatccggcggccggtggcgtcctcctccctctccctcctccccaaccaacggcgctgatcccctccgccatctccgtccatctccgcctaaaaaaactaagcgatgtcggaggggttcgacgggacggagaacggcggcggcggcggcggaggcggagtagggaaggagcaggaccggttcctgccgatcgccaacatcggccgcatcatgcgccgggccgtgccggagaacggcaagatcgccaaggactccaaggagtccgtccaggagtgcgtctccgagttcatcagcttcatcaccagcgaagcaagcgacaagtgcctcaaggagaagcgcaagaccatcaatggggacgacctgatctggtcaatgggcacgctcggattcgaggactatgtcgagcctctcaagctctacctcaggctctaccgggagacggagggtgacacaaagggttcaagagcttctgaactgccagtaaagaaagatgttgtacttaatggagatcctggatcatcgtttgaaggcatgtaggacgaggagtgtgatagcatctaggaaggagaaccatcgtttttagggaaagaacgctccagcatcctgttatgttgtaagcaggatgcttctaaagttccaataccttgttaccacgaatgttagtcgtcgttctttttgaaatgttcttgtgttagccaggatgtccaaatttgttgtaggttctagttcagtcgtgtgttgtgtggttgtgtctaaccatatttggccgtttccggctgtcctgcatatgctaaattcagaggggtaaagagatctaagaaaaaaaaaaaaaaa

SEQ ID NO: 42 - protein, 143 aa, Oryza sativa (japonica cultivar-group)
  G3396
MSEGFDGTENGGGGGGGGVGKEQDRFLPIANIGRIMRRAVPENGKIAKDSKESVQECVSEFISFITSEASDKCLKEKRKTINGDDLIWSMGTLGFEDYVEPLKLYLRLYRETEGDTKGSRASELPVKKDVVLNGDPGSSFEGM

SEQ ID NO: 43 - DNA, 732 bp, Arabidopsis thaliana
  G1820
ctcacttccaacatccaaatccctagaaattgtaaatggctgagaacaacaacaacaacggcgacaacatgaacaacgacaaccaccagcaaccaccgtcgtactcgcagctgccgccgatggcatcatccaaccctcagttacgtaattactggattgagcagatggaaaccgtctcggatttcaaaaaccgtcagcttccattggctcgaattaagaagatcatgaaggctgatccagatgtgcacatggtctccgcagaggctccgatcatcttcgcaaaggcttgcgaaatgttcatcgttgatctcacgatgcggtcgtggctcaaagccgaggagaacaaacgccacacgcttcagaaatcggatatctccaacgcagtggctagctctttcacctacgatttccttcttgatgttgtccctaaggacgagtctatcgccaccgctgatcctggctttgtggctatgccacatcctgacggtggaggagtaccgcaatattattatccaccgggagtggtgatgggaactcctatggttggtagtggaatgtacgcgccatcgcaggcgtggccagcagcggctggtgacggggaggatgatgctgaggataatggaggaaacggcggcggaaattgaagtgtagatttagggtttgtaaccgcctatgtgggaaatttgaaatttggtggtgtttattagggttcttcaattcgtcggatttgct

SEQ ID NO: 44 - protein, 202 aa, Arabidopsis thaliana
  G1820
MAENNNNNGDNMNNDNHQQPPSYSQLPPMASSNPQLRNYWIEQMETVSDFKNRQLPLARIKKIMKADPDVHMVSAEAPIIFAKACEMFIVDLTMRSWLKAEENKRHTLQKSDISNAVASSFTYDFLLDVVPKDESIATADPGFVAMPHPDGGGVPQYYYPPGVVMGTPMVGSGMYAPSQAWPAAAGDGEDDAEDNGGNGGGN

SEQ ID NO: 45 - DNA, 927 bp, Arabidopsis thaliana
  G489
gaattcggcacgagacccaccaagaggatcaaccagtctcttccccttcagattctcctttccacagtaatggatcaacaagaccatggacagtctggagctatgaactatggcacaaacccataccaaaccaacccgatgagcaccactgctgctactgtagcaggaggtgcggcacaaccaggccagctggcgttccaccagatccatcagcagcagcagcagcaacagctggcacagcagcttcaagcattttgggagaaccaattcaaagagattgagaagactaccgatttcaagaagcacagccttccccttgcgagaatcaagaaaatcatgaaagcggatgaagatgtccgtatgatctcggctgaggcgcctgtcgtgtttgcaagggcctgtgagatgttcatcctggagctgacactcaggtcgtggaaccacactgaggagaataagaggcggacgttgcagaagaacgatattgctgctgctgtgactagaaccgatatttttgatttccttgtggatattgttccccgggaggatctccgagatgaagtcttgggaagtattccgaggggcactgtcccggaagctgctgctgctggttacccgtatggatacttgcctgcaggaactgctccaataggaaatccgggaatggttatgggtaatcccggtggtgcgtatccacctaatccttatatgggtcaaccaatgtggcaacaacaggcacctgaccaacctgaccaggaaaattagcaagaaactgtgagtcttcccgcttcttttaggcctaccttgtagtcttggggttttgtttctgttttcgaataatggtaacctttgtataacttatttcagtatcgtctcagtttggtactatgtcagttttggtaaaaaaaaaaaaaaaaaaaaaaaaaa

SEQ ID NO: 46 - protein, 231 aa, Arabidopsis thaliana
  G489
MDQQDHGQSGAMNYGTNPYQTNPMSTTAATVAGGAAQPGQLAFHQIHQQQQQQQLAQQLQAFWENQFKEIEKTTDFKKHSLPLARIKKIMKADEDVRMISAEAPVVFARACEMFILELTLRSWNHTEENKRRTLQKNDIAAAVTRTDIFDFLVDIVPREDLRDEVLGSIPRGTVPEAAAAGYPYGYLPAGTAPIGNPGMVMGNPGGAYPPNPYMGQPMWQQQAPDQPDQEN

SEQ ID NO: 47 - DNA, 668 bp, Arabidopsis thaliana
  G1836
ataacaagcctagaacactagaaacttcaaaaaagaaaaaaatcttatggagaacaacaacggcaacaaccagctgccaccgaaaggtaacgagcaactgaagagtttctggtcaaaagagatggaaggtaacttagatttcaaaaatcacgaccttcctataactcgtatcaagaagattatgaagtatgatccggatgtgactatgatagctagtgaggctccaatcctcctctcgaaagcatgtgagatgtttatcatggatctcacgatgcgttcgtggctccatgctcaggaaagcaaacgagtcacgctacagaaatctaatgtcgatgccgcagtggctcaaactgttatctttgatttcttgcttgatgatgacattgaggtaaagagagagtctgttgccgccgctgctgatcctgtggccatgccacctattgacgatggagagctgcctccaggaatggtaattggaactcctgtttgttgtagtcttggaatccaccaaccacaaccacaaatgcaggcatggcctggagcttggacctcggtgtctggtgaggaggaagaagcgcgtgggaaaaaaggaggtgacgacggaaactaataagtggaatacgttttagggtattttcaagggaatatgtagtaaatagtcatggatc

SEQ ID NO: 48 - protein, 187 aa, Arabidopsis thaliana
  G1836
MENNNGNNQLPPKGNEQLKSFWSKEMEGNLDFKNHDLPITRIKKIMKYDPDVTMIASEAPILLSKACEMFIMDLTMRSWLHAQESKRVTLQKSNVDAAVAQTVIFDFLLDDDIEVKRESVAAAADPVAMPPIDDGELPPGMVIGTPVCCSLGIHQPQPQMQAWPGAWTSVSGEEEEARGKKGGDDGN

SEQ ID NO: 49 - DNA, 798 bp, Arabidopsis thaliana
  G634
atggagcaaggaggaggtggtggtggtaatgaagttgtggaggaagcttcacctattagttcaagacctcctgctaacaacttagaagagcttatgagattctcagccgccgcggatgacggtggattaggaggtggaggtggaggaggaggaggaggaagtgcttcttcttcatcgggaaatcgatggccgagagaagaaactttagctcttcttcggatccgatccgatatggattctacttttcgtgatgctactctcaaagctcctctttgggaacatgtttccaggaagctattggagttaggttacaaacgaagttcaaagaaatgcaaagagaaattcgaaaacgttcagaaatattacaaacgtactaaagaaactcgcggtggtcgtcatgatggtaaagcttacaagttcttctctcagcttgaagctctcaacactactcctcctcctcctccttctcatcctcacgctcatcaaccagaacagaaacaacaacaacaaccacaacaagagatggtcatgagctcggaacaatcatcattaccatcatcatcaagatggccaaaggcagagattctagcgcttataaacctgagaagtggaatggaaccaaggtaccaagataatgtacctaaaggacttctatgggaagagatctcaacttcaatgaagagaatgggatacaacagaaacgctaagagatgtaaagagaaatgggaaaacataaacaaatactacaagaaagttaaagaaagcaacaacagcaactacaacaacaagaatcaatga

SEQ ID NO: 50 - protein, 265 aa, Arabidopsis thaliana
  G634
MEQGGGGGGNEVVEEASPISSRPPANNLEELMRFSAAADDGGLGGGGGGGGGGSASSSSGNRWPREETLALLRIRSDMDSTFRDATLKAPLWEHVSRKLLELGYKRSSKKCKEKFENVQKYYKRTKETRGGRHDGKAYKFFSQLEALNTTPPPPPSHPHAHQPEQKQQQQPQQEMVMSSEQSSLPSSSRWPKAEILALINLRSGMEPRYQDNVPKGLLWEEISTSMKRMGYNRNAKRCKEKWENINKYYKKVKESNNSNYNNKNQ

SEQ ID NO: 51 - DNA, 1388 bp, Arabidopsis thaliana
  G926
ccaaaatctagggttttcttctcgcccaatttcacttttcttctacgaaattctccattcctgccggctgtcgggttttctgaatcgattctccttcaccaacttcttctctggttctgttcgattctgattttttttcaaggtcaattttttcttctctttaaactctgcaaaatcgtgatcgattaaattcacctcagggttttttgatttctgaaagaagttaatcttcttcgaaggcgattgcaaaagagtgctctgctgtgaatttccactgagatgcaatcaaaaccgggaagagaaaacgaagaggaagtcaataatcaccatgctgttcagcagccgatgatgtatgcagagccctggtggaaaaacaactcctttggtgttgtacctcaagcgagaccttctggaattccatcaaattcctcttctttggattgccccaatggttccgagtcaaacgatgttcattcagcatctgaagacggtgcgttgaatggtgaaaacgatggcacttggaaggattcacaagctgcaacttcctctcgttcagataatcacggaatggaaggaaatgacccagcgctctctatccgtaacatgcatgatcagccacttgtacaaccaccagagcttgttggacactatatcgcttgtgtcccaaacccatatcaggatccatattatgggggattgatgggagcatatggtcatcagcaattgggttttcgtccatatcttggaatgcctcgtgaaagaacagctctgccacttgacatggcacaagagcccgtttatgtgaatgcaaagcagtacgagggaattctaaggcgaagaaaagcacgtgccaaggcagagctagagaggaaagtcatccgggacagaaagccatatcttcacgagtcaagacacaagcatgcaatgagaagggcacgagcgagtggaggccggtttgcgaagaaaagtgaggtagaagcgggagaggatgcaggagggagagacagagaaaggggttcagcaaccaactcatcaggctctgaacaagttgagacagactctaatgagaccctgaattcttctggtgcaccataataaaaaaagccaaagctctgagaggagagagagacacacactttggctaatataatccattgcctcaaaccggcaaatcattcttggctttttcgtttttgtgtttgctagttgttcttgtcagagtctcatattgtgtgggtttaacagttatgatgaatgtacaaagagcgagttatgttaggtgttagattttggagacaagagacaaaggaatagcaagtaggtcttgtttttattctttgaccttttttttctcttttgcaaaattgaaaaatacgtttgcttaaaaa

SEQ ID NO: 52 - protein, 271 aa, Arabidopsis thaliana
  G926
MQSKPGRENEEEVNNHHAVQQPMMYAEPWWKNNSFGVVPQARPSGIPSNSSSLDCPNGSESNDVHSASEDGALNGENDGTWKDSQAATSSRSDNHGMEGNDPALSIRNMHDQPLVQPPELVGHYIACVPNPYQDPYYGGLMGAYGHQQLGFRPYLGMPRERTALPLDMAQEPVYVNAKQYEGILRRRKARAKAELERKVIRDRKPYLHESRHKHAMRRARASGGRFAKKSEVEAGEDAGGRDRERGSATNSSGSEQVETDSNETLNSSGAP

SEQ ID NO: 53 - DNA, 1274 bp, Arabidopsis thaliana
  G1334
atagctcccaactaataggaatctcaagcttctcactctctcttgtttttccattggacttttggaacataagctatgcaaactgaggagcttttgtcgccaccacagactccttggtggaatgcttttggatctcagccgttgactacagagagcctttccggcgaagcttctgattcattcaccggagttaaggcagttactacggaggcagaacaaggtgtggtggataaacaaacttctacaactctcttcactttctcacctggtggtgaaaagagttcaagagatgtgccaaagcctcatgttgctttcgcgatgcaatcagcttgcttcgagtttggatttgctcagccaatgatgtacacaaagcatcctcatgttgaacaatactatggagttgtttcagcatacggatctcagaggtcttcgggccgagtaatgattccactgaagatggagacagaagaagatggtaccatctatgtgaactcaaagcagtaccatggaattatcaggcgacgccagtcccgagcaaaggctgaaaaactgagtagatgccgtaagccatatatgcatcactcacgccatctccatgctatgcgccgtcctagaggatctggcgggcgtttcttgaacaccaagacagctgatgcggctaagcagtctaagccgagtaattctcagagttctgaagtctttcatccggaaaatgagaccataaactcatcgagggaagcaaatgagtcaaatctctcggattctgcagttacaagtatggattactttctaagttcgtcggcttattctcctggtggcatggtcatgcctatcaagtggaatgcagcagcaatggatattggctgctgcaaacttaatatatgatcagcagataggggacaagacatgattggtcaccagtccttttgtcttgtcccttatctttcagccaaacggaaagagaacttgtgtcttggaaaaaagacattgagtttccttggtttataagattggtccttttaccatccgtttggctgtaaacaggcaaatcatctttggctcatgcttcatcaagttcttatcttcgtctgttttcttctacgcatcttcataagatctctgaactagtgaataacatttcctagcatcatgtttcaactagtgtgtgttgtaagaaactctgccttatttccagatgatgtattgtgtgtaacgtgtttatgaaacaaacgtaagactttcaagttaaaaaaaaaaaaaaaaaaaaaaaaaaa

SEQ ID NO: 54 - protein, 269 aa, Arabidopsis thaliana
  G1334
MQTEELLSPPQTPWWNAFGSQPLTTESLSGEASDSFTGVKAVTTEAEQGVVDKQTSTTLFTFSPGGEKSSRDVPKPHVAFAMQSACFEFGFAQPMMYTKHPHVEQYYGVVSAYGSQRSSGRVMIPLKMETEEDGTIYVNSKQYHGIIRRRQSRAKAEKLSRCRKPYMHHSRHLHAMRRPRGSGGRFLNTKTADAAKQSKPSNSQSSEVFHPENETINSSREANESNLSDSAVTSMDYFLSSSAYSPGGMVMPIKWNAAAMDIGCCKLNI

SEQ ID NO: 55 - DNA, 757 bp, Arabidopsis thaliana
  G1781
cgtcgaccagattgatcacatgtggttaacatcaatcaaaaaaaaaaacaaagagatagagatatgactgaggagagcccagaagaagatcatgggtctcctggagtagctgaaacaaatccaggaagcccttcttcaaagaccaacaacaacaacaacaacaacaaagaacaagaccggtttcttcccattgcgaatgtcggaaggatcatgaaaaaagttcttcccggtaacggtaagatctcaaaagacgctaaagaaaccgttcaagaatgtgtctcggagttcattagtttcgtcactggtgaagcttctgacaagtgtcaaagagaaaagaggaagaccatcaatggagatgatatcatttgggctatcacaactctcggtttcgaagactacgtggctccattaaaggtctacctctgcaaatatagagacaccgaaggagagaaagttaacagcccaaaacaacaacaacaaagacaacaacaacagcagattcaacaacagaatcatcataattatcagtttcaagaacaagaccaaaacaataacaacatgtcatgtactagttacatctctcatcatcatccttctccattcctaccagtggatcatcaaccttttcccaatattgctttctctcctaaatcattgcagaaacagttcccgcagcagcatgataataacattgattcaattcactggtgagagagacatttgcttgcgggccgctctaggcgggaaaagcccgaat

SEQ ID NO: 56 - protein, 215 aa, Arabidopsis thaliana
  G1781
MTEESPEEDHGSPGVAETNPGSPSSKTNNNNNNNKEQDRFLPIANVGRIMKKVLPGNGKISKDAKETVQECVSEFISFVTGEASDKCQREKRKTINGDDIIWAITTLGFEDYVAPLKVYLCKYRDTEGEKVNSPKQQQQRQQQQQIQQQNHHNYQFQEQDQNNNNMSCTSYISHHHPSPFLPVDHQPFPNIAFSPKSLQKQFPQQHDNNIDSIHW

SEQ ID NO: 57 - DNA, 920 bp, Oryza sativa (japonica cultivar-group)
  G3429
ccaggtcattgagacttgagagacatggcagggaacaaaaagcgtggtatagtagtatagtcagtactaggattagtacttgataactagcacaacaaaaagctactatcatttttgcattcaaagtggtaattaagaatcggatgatcattttgattgttcctcttcatttgttttggatgtcaggtggcaggaacatggatcaggtcaagaaggcggcagtgagatcggatggggtgggaggtagtgcgaccaacgccgagctgccgatggccaacctcgtacgcctgataaagaaggtgctcccagggaaagcgaagatcgggggagcagccaagggtctcacccatgattgcgcggtggagttcgtcgggttcgtcggcgacgaggcctccgagaaggccaaggcagagcaccgccgcaccgtagcgccggaagactacttgggctcattcggcgaccttggcttcgatcgctacgtcgaccccatggatgcctacatccatggttaccgtgagtttgagagggctggtgggaataggagggtggcgccgcctcctccggcggcagctacaccgctgacgcccggtggaccgacattcactgacgcagagctgcagtttctccggtcggtgatcccctccagaagtgatgatgaatatagcggctcatcaccagccataggcggctatggctatggatatggctatggaaaaaatatgtgaacaacttgatgcatgtgtgtgtgtacactgcatgcatgcgtggagggtcaaacagagtcaagactcttgtggtggtttcaataagtctctagtgacaatataagttgtgtatcgttgtttcctttgtaaaaaaaaaaacgtcatgtatcgttgtgtgtcctcatccggtaatcctttacgtgggtgggttatggc

SEQ ID NO: 58 - protein, 193 aa, Oryza sativa (japonica cultivar-group)
  G3429
MIILIVPLHLFWMSGGRNMDQVKKAAVRSDGVGGSATNAELPMANLVRLIKKVLPGKAKIGGAAKGLTHDCAVEFVGFVGDEASEKAKAEHRRTVAPEDYLGSFGDLGFDRYVDPMDAYIHGYREFERAGGNRRVAPPPPAAATPLTPGGPTFTDAELQFLRSVIPSRSDDEYSGSSPAIGGYGYGYGYGKNM

SEQ ID NO: 59 - DNA, 341 bp, Arabidopsis thaliana
  G682
acatggataaccatcgcaggactaagcaacccaagaccaactccatcgttacttcttcttctgaaggaacagaagtgagtagtcttgagtgggaagttgtgaacatgagtcaagaagaagaagatttggtctctcgaatgcataagcttgtcggtgacaggtgggaactgatagctgggaggatcccaggaagaaccgctggagaaattgagaggttttgggtcatgaaaaattgaaaagtgatcaatatatctctatagtttcactgattgtttcgattatattccgttgtattttaaatttaccaactctgttataagaagaaaactttcttaaatccc

SEQ ID NO: 60 - protein, 77 aa, Arabidopsis thaliana
  G682
MDNHRRTKQPKTNSIVTSSSEGTEVSSLEWEVVNMSQEEEDLVSRMHKLVGDRWELIAGRIPGRTAGEIERFWVMKN

SEQ ID NO: 61 - DNA, 407 bp, Arabidopsis thaliana
  G226
ccagtagttatggataataccaaccgtcttcgtcttcgtcgcggtcccagtcttaggcaaactaagttcactcgatcccgatatgactctgaagaagtgagtagcatcgaatgggagtttatcagtatgaccgaacaagaagaagatctcatctctcgaatgtacagacttgtcggtaataggtgggatttaatagcaggaagagtcgtaggaagaaaggcaaatgagattgagagatactggattatgagaaactctgactatttttctcacaaacgacgacgtcttaataattctccctttttttctacttctcctcttaatctccaagaaaatctaaaattgtaaagaaatcaaaataaaagctttcaatcataaaagtagaacaaatcttgaatgtcttctca

SEQ ID NO: 62 - protein, 112 aa, Arabidopsis thaliana
  G226
MDNTNRLRLRRGPSLRQTKFTRSRYDSEEVSSIEWEFISMTEQEEDLISRMYRLVGNRWDLIAGRVVGRKANEIERYWIMRNSDYFSHKRRRLNNSPFFSTSPLNLQENLKL

SEQ ID NO: 63 - DNA, 252 bp, Arabidopsis thaliana
  G2718
atgaatacgcagcgtaagtcgaagcatcttaagaccaatccaaccattgttgcctcttcttctgaagaagtgagcagtcttgagtgggaagaaatagcaatggctcaggaagaagaggatttgatttgcaggatgtataagcttgtcggtgaaaggtgggatttaatagctgggaggattccaggaagaacagcagaagagattgagaggttttgggtgatgaagaatcatcgaagatctcaattacgttga

SEQ ID NO: 64 - protein, 83 aa, Arabidopsis thaliana
  G2718
MNTQRKSKHLKTNPTIVASSSEEVSSLEWEEIAMAQEEEDLICRMYKLVGERWDLIAGRIPGRTAEEIERFWVMKNHRRSQLR

SEQ ID NO: 65 - DNA, 356 bp, Oryza sativa (japonica cultivar-group)
  G3393
cataaggtcataacaagggtctgaggatcttagctagcacaagatctcaactcggcatttcattggagtttttcacgcctaatggatagcagcagtggtagccagggaaagaattccaaaaccagtgatggttgtgaaacaaaagaagttaataacactgcacagaattttgttcatttcacggaagaagaggaagatctcgttttcagaatgcacaggcttgttgggaacaggtgggaacttatagctggaagaatccctggaagaacagcaaaagaggtagaaatgttctgggcagtaaagcaccagaatacataaggggggaaaaagggtgtatgccctaaaagtagcgtaca

SEQ ID NO: 66 - protein, 78 aa, Oryza sativa (japonica cultivar-group)
  G3393
MDSSSGSQGKNSKTSDGCETKEVNNTAQNFVHFTEEEEDLVFRMHRLVGNRWELIAGRIPGRTAKEVEMFWAVKHQNT

SEQ ID NO: 67 - DNA, 257 bp, Zea mays
  G3431
ctaatggatagcagcagtggtagccaggacaagaaattcagagacaatgatcgccctgaagcaaaagaagctaatagcaccgcacagcatcttgttgacttcacggaagcagaggaagatcttgtttccagaatgcacaggcttgtggggaacaggtgggagattatagcaggaagaatcccaggaaggacagcagaagaggtagagatgttctggtccaaaaaataccaggaaagatgaaaccgaggccttagatt

SEQ ID NO: 68 - protein, 78 aa, Zea mays
  G3431
MDSSSGSQDKKFRDNDRPEAKEANSTAQHLVDFTEAEEDLVSRMHRLVGNRWEIIAGRIPGRTAEEVEMFWSKKYQER

SEQ ID NO: 69 - DNA, 268 bp, Zea mays
  G3444
cctaacccctctaatggatagcagcagtggtagccaggacaagaaattcagagacaatgatcgccctgaagcaaaagaagctaatagcaccgcacagcatcttgttgacttcacggaagcagaggaagatcttgtttccagaatgcacaggcttgtggggaacaggtgggagattatagcaggaagaatcccaggaaggacagcagaagaggtagagatgttctggtccaaaaaataccaggaaagatgaaaccgaggccttagattt

SEQ ID NO: 70 - protein, 78 aa, Zea mays; identical to SEQ ID NO: 68
  G3444

SEQ ID NO: 71 - DNA, 321 bp, Oryza sativa (japonica cultivar-group)
  G3392
gctctaaactaccataaaatcttaactcggcattttttttttcacgctaatggaaagtagcggtggaagccagctgggaaagaattccaaaacaagtgatggtcgtgaaacaaaagaagttaatagcactgcgcaaaattttgttcatttcacagaagaagaggaagatattgttttcagaatgcacaggcttgtcgggaacaggtgggaacttatagctggaagaataccgggaaggacagcagaagaagtagagaagttctgggcaattaaacatcaagccacatgatagcagaaagaggatgtttgccccaaaagtag

SEQ ID NO: 72 - protein, 79 aa, Oryza sativa (japonica cultivar-group)
  G3392
MESSGGSQLGKNSKTSDGRETKEVNSTAQNFVHFTEEEEDIVFRMHRLVGNRWELIAGRIPGRTAEEVEKFWAIKHQAT

SEQ ID NO: 73 - DNA, 285 bp, Glycine max
  G3450
cagctcagaaggcaaagatagatccatgtccaccaccgcaactacaacctctgaagaagttagcagcaatgagtggaaagtcatacacatgagcgagcaagaggaggatctcattcgcaggatgtacaagctagtcggggacaagtggaatttgatagctggtcgcattcccggtcgtaaagcagaagaaatagagagattctggattatgagacacggcgatgctttttctgttaaaagaaacggaagtaaaacccaagactcgtgattttctctggtcatgta

SEQ ID NO: 74 - protein, 80 aa, Glycine max
  G3450
MSTTATTTSEEVSSNEWKVIHMSEQEEDLIRRMYKLVGDKWNLIAGRIPGRKAEEIERFWIMRHGDAFSVKRNGSKTQDS

SEQ ID NO: 75 - DNA, 318 bp, Arabidopsis thaliana
  G1816
atggataacactgaccgtcgtcgccgtcgtaagcaacacaaaatcgccctccatgactctgaagtgagcagtatcgaatgggagtttatcaacatgactgaacaagaagaagatctcatctttcgaatgtacagacttgtcggtgataggtgggatttgatagcaggaagagttcctggaagacaaccagaggagatagagagatattggataatgagaaacagtgaaggctttgctgataaacgacgccagcttcactcatcttcccacaaacataccaagcctcaccgtcctcgcttttctatctatccttcctag

SEQ ID NO: 76 - protein, 105 aa, Arabidopsis thaliana
  G1816
MDNTDRRRRRKQHKIALHDSEVSSIEWEFINMTEQEEDLIFRMYRLVGDRWDLIAGRVPGRQPEEIERYWIMRNSEGFADKRRQLHSSSHKHTKPHRPRFSIYPS

SEQ ID NO: 77 - DNA, 268 bp, Glycine max
  G3449
actcttctagctccttgcaatggctgactcggatcgctcttctagtgaagtttctacacattctactgattcagggaagcgagggtcttccaaagttgaattttctgaagatgaggaaactcttatcatcaggatgtataaactggtaggggagaggtggtctttaattgctggaaggattcctggaagaacagcagaggaaatagagaagtattggacttcaagattctcaggttctagtgaatgaggtgccaagagttctactacc

SEQ ID NO: 78 - protein, 75 aa, Glycine max
  G3449
MADSDRSSSEVSTHSTDSGKRGSSKVEFSEDEETLIIRMYKLVGERWSLIAGRIPGRTAEEIEKYWTSRFSGSSE

SEQ ID NO: 79 - DNA, 264 bp, Glycine max
  G3448
attctccacgcctccttgcaatggctgactcggatctctcttcaagtcaaatttctacacattctactgattcaggaaatcgagggtcttccaaagttgaattttctgaagatgaggaaaccctcatcatcaggatgtataaactggtaggggagaggtggtctataattgctggaaggattcctggaagaacagcagaggaaatagagaagtattggacttcaagattctcgggctctagtgaatgaagctccggagtactac

SEQ ID NO: 80 - protein, 75 aa, Glycine max
  G3448
MADSDLSSSQISTHSTDSGNRGSSKVEFSEDEETLIIRMYKLVGERWSIIAGRIPGRTAEEIEKYWTSRFSGSSE

SEQ ID NO: 81 - DNA, 257 bp, Glycine max
  G3446
gagaacttgttatgcaatggctgacatagatcgctcctttgataataatgtttctgctgtttctactgagaaatcaagccaagtttcagatgttgaattttctgaagctgaggaaatccttattgccatggtgtataatctggttggggagaggtggtctttgattgctggaagaattcctggaagaactgcagaagagatagagaaatattggacttcaagattttcgactagccaatgatcggtggcagaaaacg

SEQ ID NO: 82 - protein, 74 aa, Glycine max
  G3446
MADIDRSFDNNVSAVSTEKSSQVSDVEFSEAEEILIAMVYNLVGERWSLIAGRIPGRTAEEIEKYWTSRFSTSQ

SEQ ID NO: 83 - DNA, 302 bp, Glycine max
  G3445
agaacttgttattgcaatgactgacatagatcgctcctctgataatgtttcttctgattctattgagaaatcaagccaagtttctgatgttgaattttctgaagctgaggaaatccttattgccatggtgtataatctggttggagaaaggtggtctttgattgctggaagaattcctggaagaactgcagaagaaatagagaaatattggacttcaagattttcgactagccaatgaagtggcagaaattaaacgaagcaagacaattttgggtgcctgcaactcattatacagtgactta

SEQ ID NO: 84 - protein, 73 aa, Glycine max
  G3445
MTDIDRSSDNVSSDSIEKSSQVSDVEFSEAEEILIAMVYNLVGERWSLIAGRIPGRTAEEIEKYWTSRFSTSQ

SEQ ID NO: 85 - DNA, 250 bp, Glycine max
  G3447
gttattgcaatggctgacatagatcgctcctttgataataatgtttctgctgtttctactgagaaatcaagccaagtttcagatgttgaattttctgaagctgaggaaatccttattgccatggtgtataatctggttggggagaggtggtctttgattgctggaagaattcctggaagaactgcagaagagatagagaaatattggacttcaagattttcgactagccaatgatcggtggcagaaaacg

SEQ ID NO: 86 - protein, 74 aa, Glycine max; identical to SEQ ID NO: 82
  G3447

SEQ ID NO: 87 - DNA, 1281 bp, Arabidopsis thaliana
  G867
cacaacacaaacacatttctgttttctccattgtttcaaaccataaaaaaaaacacagattaaatggaatcgagtagcgttgatgagagtactacaagtacaggttccatctgtgaaaccccggcgataactccggcgaaaaagtcgtcggtaggtaacttatacaggatgggaagcggatcaagcgttgtgttagattcagagaacggcgtagaagctgaatctaggaagcttccgtcgtcaaaatacaaaggtgtggtgccacaaccaaacggaagatggggagctcagatttacgagaaacaccagcgcgtgtggctcgggacattcaacgaagaagacgaagccgctcgtgcctacgacgtcgcggttcacaggttccgtcgccgtgacgccgtcacaaatttcaaagacgtgaagatggacgaagacgaggtcgatttcttgaattctcattcgaaatctgagatcgttgatatgttgaggaaacatacttataacgaagagttagagcagagtaaacggcgtcgtaatggtaacggaaacatgactaggacgttgttaacgtcggggttgagtaatgatggtgtttctacgacggggtttagatcggcggaggcactgtttgagaaagcggtaacgccaagcgacgttgggaagctaaaccgtttggttataccgaaacatcacgcagagaaacattttccgttaccgtcaagtaacgtttccgtgaaaggagtgttgttgaactttgaggacgttaacgggaaagtgtggaggttccgttactcgtattggaacagtagtcagagttatgttttgactaaaggttggagcaggttcgttaaggagaagaatctacgtgctggtgacgtggttagtttcagtagatctaacggtcaggatcaacagttgtacattgggtggaagtcgagatccgggtcagatttagatgcgggtcgggttttgagattgttcggagttaacatttcaccggagagttcaagaaacgacgtcgtaggaaacaaaagagtgaacgatactgagatgttatcgttggtgtgtagcaagaagcaacgcatctttcacgcctcgtaacaactcttcttctttttttttcttttgttgttttaataatttttaaaaactccattttcgttttctttatttgcatcggtttctttcttcttgtttaccaaaggttcatgagttgtttttgttgtattgatgaactgtaaattttatttataggataaattttaaaaaaaaaaaaaaaaaaaa

SEQ ID NO: 88 - protein, 344 aa, Arabidopsis thaliana
  G867
MESSSVDESTTSTGSICETPAITPAKKSSVGNLYRMGSGSSVVLDSENGVEAESRKLPSSKYKGVVPQPNGRWGAQIYEKHQRVWLGTFNEEDEAARAYDVAVHRFRRRDAVTNFKDVKMDEDEVDFLNSHSKSEIVDMLRKHTYNEELEQSKRRRNGNGNMTRTLLTSGLSNDGVSTTGFRSAEALFEKAVTPSDVGKLNRLVIPKHHAEKHFPLPSSNVSVKGVLLNFEDVNGKVWRFRYSYWNSSQSYVLTKGWSRFVKEKNLRAGDVVSFSRSNGQDQQLYIGWKSRSGSDLDAGRVLRLFGVNISPESSRNDVVGNKRVNDTEMLSLVCSKKQRIFHAS

SEQ ID NO: 89 - DNA, 1239 bp, Arabidopsis thaliana
  G993
caaatatggaatacagctgtgtagacgacagtagtacaacgtcagaatctctctccatctctactactccaaagccgacaacgacgacggagaagaaactctcttctccgccggcgacgtcgatgcgtctctacagaatgggaagcggcggaagcagcgtcgttttggattcagagaacggcgtcgagaccgagtcacgtaagcttccttcgtcgaaatataaaggcgttgtgcctcagcctaacggaagatggggagctcagatttacgagaagcatcagcgagtttggctcggtactttcaacgaggaagaagaagctgcgtcttcttacgacatcgccgtgaggagattccgcggccgcgacgccgtcactaacttcaaatctcaagttgatggaaacgacgccgaatcggcttttcttgacgctcattctaaagctgagatcgtggatatgttgaggaaacacacttacgccgatgagtttgagcagagtagacggaagtttgttaacggcgacggaaaacgctctgggttggagacggcgacgtacggaaacgacgctgttttgagagcgcgtgaggttttgttcgagaagactgttacgccgagcgacgtcgggaagctgaaccgtttagtgataccgaaacaacacgcggagaagcattttccgttaccggcgatgacgacggcgatggggatgaatccgtctccgacgaaaggcgttttgattaacttggaagatagaacagggaaagtgtggcggttccgttacagttactggaacagcagtcaaagttacgtgttgaccaagggctggagccggttcgttaaagagaagaatcttcgagccggtgatgtggtttgtttcgagagatcaaccggaccagaccggcaattgtatatccactggaaagtccggtctagtccggttcagactgtggttaggctattcggagtcaacattttcaatgtgagtaacgagaaaccaaacgacgtcgcagtagagtgtgttggcaagaagagatctcgggaagatgatttgttttcgttagggtgttccaagaagcaggcgattatcaacatcttgtgacaaattctttttttttggtttttttcttcaatttgtttctcctttttcaatattttgtattgaaatgacaagttgtaaattaggacaagacaagaaaaaatgacaactagacaaaatagtttttgtttaaaaaaaaaaaaaaaaaaaa

SEQ ID NO: 90 - protein, 361 aa, Arabidopsis thaliana
  G993
MEYSCVDDSSTTSESLSISTTPKPTTTTEKKLSSPPATSMRLYRMGSGGSSVVLDSENGVETESRKLPSSKYKGVVPQPNGRWGAQIYEKHQRVWLGTFNEEEEAASSYDIAVRRFRGRDAVTNFKSQVDGNDAESAFLDAHSKAEIVDMLRKHTYADEFEQSRRKFVNGDGKRSGLETATYGNDAVLRAREVLFEKTVTPSDVGKLNRLVIPKQHAEKHFPLPAMTTAMGMNPSPTKGVLINLEDRTGKVWRFRYSYWNSSQSYVLTKGWSRFVKEKNLRAGDVVCFERSTGPDRQLYIHWKVRSSPVQTVVRLFGVNIFNVSNEKPNDVAVECVGKKRSREDDLFSLGCSKKQAIINIL

SEQ ID NO: 91 - DNA, 1155 bp, Arabidopsis thaliana
  G1930
attcacattactaatctctcaagatttcacaattttcttgtgattttctctcagtttcttatttcgtttcataacatggatgccatgagtagcgtagacgagagctctacaactacagattccattccggcgagaaagtcatcgtctccggcgagtttactatatagaatgggaagcggaacaagcgtggtacttgattcagagaacggtgtcgaagtcgaagtcgaagccgaatcaagaaagcttccttcttcaagattcaaaggtgttgttcctcaaccaaatggaagatggggagctcagatttacgagaaacatcaacgcgtgtggcttggtactttcaacgaggaagacgaagcagctcgtgcttacgacgtcgcggctcaccgtttccgtggccgcgatgccgttactaatttcaaagacacgacgttcgaagaagaggttgagttcttaaacgcgcattcgaaatcagagatcgtagatatgttgagaaaacacacttacaaagaagagttagaccaaaggaaacgtaaccgtgacggtaacggaaaagagacgacggcgtttgctttggcttcgatggtggttatgacggggtttaaaacggcggagttactgtttgagaaaacggtaacgccaagtgacgtcgggaaactaaaccgtttagttataccaaaacaccaagcggagaaacattttccgttaccgttaggtaataataacgtctccgttaaaggtatgctgttgaatttcgaagacgttaacgggaaagtgtggaggttccgttactcttattggaatagtagtcaaagttatgtgttgaccaaaggttggagtagattcgttaaagagaagagactttgtgctggtgatttgatcagttttaaaagatccaacgatcaagatcaaaaattctttatcgggtggaaatcgaaatccgggttggatctagagacgggtcgggttatgagattgtttggggttgatatttctttaaacgccgtcgttgtagtgaaggaaacaacggaggtgttaatgtcgtcgttaaggtgtaagaagcaacgagttttgtaataacaatttaacaacttgggaaagaaaaaaaagctttttgattttaatttctcttcaacgttaatcttgctgagatta

SEQ ID NO: 92 - protein, 333 aa, Arabidopsis thaliana
  G1930
MDAMSSVDESSTTTDSIPARKSSSPASLLYRMGSGTSVVLDSENGVEVEVEAESRKLPSSRFKGVVPQPNGRWGAQIYEKHQRVWLGTFNEEDEAARAYDVAAHRFRGRDAVTNFKDTTFEEEVEFLNAHSKSEIVDMLRKHTYKEELDQRKRNRDGNGKETTAFALASMVVMTGFKTAELLFEKTVTPSDVGKLNRLVIPKHQAEKHFPLPLGNNNVSVKGMLLNFEDVNGKVWRFRYSYWNSSQSYVLTKGWSRFVKEKRLCAGDLISFKRSNDQDQKFFIGWKSKSGLDLETGRVMRLFGVDISLNAVVVVKETTEVLMSSLRCKKQRVL

SEQ ID NO: 93 - DNA, 1338 bp, Oryza sativa (japonica cultivar-group)
  G3391
ggagagtaggagtgtgctagtgtgtgaggtctactgaaatggacagctccagctgcctggtggatgataccaacagcggcggctcgtccacggacaagctgagggcgttggccgccgcggcggcggagacggcgccgctggagcgcatggggagcggggcgagcgcggtggtggacgcggccgagcctggcgcggaggcggactccgggtccgggggacgtgtgtgcggcggcggcggcggcggtgccggcggtgcgggagggaagctgccgtcgtccaagttcaagggcgtcgtgccgcagcccaacgggaggtggggcgcgcagatctacgagcggcaccagcgggtgtggctcggcacgttcgccggggaggacgacgccgcgcgcgcctacgacgtcgccgcgcagcgcttccgcggccgcgacgccgtcaccaacttccgcccgctcgccgaggccgacccggacgccgccgccgagcttcgcttcctcgccacgcgctccaaggccgaggtcgtcgacatgctccgcaagcacacctacttcgacgagctcgcgcagagcaagcgcaccttcgccgcctccacgccgtcggccgcgaccaccaccgcctccctctccaacggccacctctcgtcgccccgctcccccttcgcgcccgccgcggcgcgcgaccacctgttcgacaagacggtcaccccgagcgacgtgggcaagctgaacaggctcgtcataccgaagcagcacgccgagaagcacttcccgctacagctcccgtccgccggcggcgagagcaagggtgtcctcctcaacttcgaggacgccgccggcaaggtgtggcggttccggtactcgtactggaacagcagccagagctacgtgctaaccaagggctggagccgcttcgtcaaggagaagggtctccacgccgacggcaagctcttcatcgactgcaagttagtacggtcgaccggcgccgccctcgcgtcgcccgctgatcagccagcgccgtcgccggtgaaggccgtcaggctcttcggcgtggacctgctcacggcgccggcgccggtcgaacagatggccgggtgcaagagagccagggacttggcggcgacgacgcctccacaagcggcggcgttcaagaagcaatgcatagagctggcactagtatagagttagcactattagctcgatcttctctagctagtgtcttttttgctcccatgcatcataattcaggtggtagctagcttagtcccttgttgatcctatctactaatctcacttggttttttttgttaatttattcgcccatgttcttgcttgctttgctgta

SEQ ID NO: 94 - protein, 378 aa, Oryza sativa (japonica cultivar-group)
  G3391
MDSSSCLVDDTNSGGSSTDKLRALAAAAAETAPLERMGSGASAVVDAAEPGAEADSGSGGRVCGGGGGGAGGAGGKLPSSKFKGVVPQPNGRWGAQIYERHQRVWLGTFAGEDDAARAYDVAAQRFRGRDAVTNFRPLAEADPDAAAELRFLATRSKAEVVDMLRKHTYFDELAQSKRTFAASTPSAATTTASLSNGHLSSPRSPFAPAAARDHLFDKTVTPSDVGKLNRLVIPKQHAEKHFPLQLPSAGGESKGVLLNFEDAAGKVWRFRYSYWNSSQSYVLTKGWSRFVKEKGLHADGKLFIDCKLVRSTGAALASPADQPAPSPVKAVRLFGVDLLTAPAPVEQMAGCKRARDLAATTPPQAAAFKKQCIELALV

SEQ ID NO: 95 - DNA, 1301 bp, Glycine max
  G3455
tcttagaatccgtacggtctaatcaacacaacaaaatggatgcaattagttgcctggatgagagcaccaccaccgagtcactctccataagtcaggcgaagccttcttcgacgattatgtcgtccgagaaggcttctccttccccgccgccgccgaacaggctgtgccgcgtcggtagcggtgctagcgcagtcgtggattccgacggcggcggcgggggtggcagcaccgaggtggagtcgcggaagctcccctcgtccaagtataagggcgtcgtgccccagcccaacggccgctggggctcgcagatttacgagaagcaccagcgcgtgtggctgggaacgttcaacgaggaagacgaggcggcgcgtgcgtacgacgtcgccgtgcagcgattccgcggcaaggacgccgtcacaaacttcaagccgctctccggcaccgacgacgacgacggggaatcggagtttctcaactcgcattcgaaatccgagatcgtcgacatgctgcgtaagcatacgtacaatgacgagctggaacaaagcaagcgcagccgcggcttcgtacgtcggcgcggctccgccgccggcgccggaaacggaaactcaatctccggcgcgtgtgttatgaaggcgcgtgagcagctattccagaaggccgttacgccgagcgacgttgggaaactgaaccgtttggtgataccgaagcagcacgcggagaagcactttcctttacagagcgctgctaacggcgttagcgcgacggcgacggcggcgaagggcgttttgttgaacttcgaagacgttggagggaaagtgtggcggtttcgttactcgtattggaacagtagccagagttacgtcttgaccaaaggttggagccggttcgttaaggagaagaatctgaaagccggtgacacggtttgttttcaacggtccactggaccggacaggcagctttacatcgattggaagacgaggaatgttgttaacgaggtcgcgttgttcggaccggttgtcgaaccgatccagatggttcggctctttggtgttaacattttgaaactacccggttcagattctatcgccaataacaataatgcaagtgggtgctgcaatggcaagagaagagaaatggaactcttttcattagagtgtagcaagaaacctaagattattggtgctttgtagcgttacgttactttttttgagttttttttttttttttgagttttgtgactgatgaaagaaagaaggtacaagaagaacggcggtgtagtggcatagtggcatcgcaagttg

SEQ ID NO: 96 - protein, 384 aa, Glycine max
  G3455
MDAISCLDESTTTESLSISQAKPSSTIMSSEKASPSPPPPNRLCRVGSGASAVVDSDGGGGGGSTEVESRKLPSSKYKGVVPQPNGRWGSQIYEKHQRVWLGTFNEEDEAARAYDVAVQRFRGKDAVTNFKPLSGTDDDDGESEFLNSHSKSEIVDMLRKHTYNDELEQSKRSRGFVRRRGSAAGAGNGNSISGACVMKAREQLFQKAVTPSDVGKLNRLVIPKQHAEKHFPLQSAANGVSATATAAKGVLLNFEDVGGKVWRFRYSYWNSSQSYVLTKGWSRFVKEKNLKAGDTVCFQRSTGPDRQLYIDWKTRNVVNEVALFGPVVEPIQMVRLFGVNILKLPGSDSIANNNNASGCCNGKRREMELFSLECSKKPKIIGAL

SEQ ID NO: 97 - DNA, 1081 bp, Glycine max
  G3452
caccaacacaaaatggatggaggctgtgtcacagacgaaaccaccacatccagcgactctctttccgttccgccgcccagccgcgtcggcagcgttgcaagcgccgtcgtcgaccccgacggttgttgcgtttccggcgaggccgaatcccggaaactcccttcgtcgaaatacaaaggcgtggtgccgcaaccgaacggtcgctggggagctcagatttacgagaagcaccagcgcgtgtggctcggcactttcaacgaggaagacgaagccgccagagcctacgacatcgccgcgctgcgcttccgcggccccgacgccgtcaccaacttcaagcctcccgccgcctccgacgacgccgagtccgagttcctcaactcgcattccaagttcgagatcgtcgacatgctccgcaagcacacctacgacgacgagctccagcagagcacgcgcggtggtaggcgccgcctcgacgctgacaccgcgtcgagcggtgtgttcgacgcgaaagcgcgtgagcagctgttcgagaaaacggttacgccgagcgacgtcgggaagctgaatcgattagtgataccgaagcagcacgcggagaagcactttccgttaagcggatccggcgacgaaagctcgccgtgcgtggcgggggcttcggcggcgaagggaatgttgttgaactttgaggacgttggagggaaagtgtggcggtttcgttactcttattggaacagtagccagagctacgtgcttaccaaaggatggagccggttcgttaaggagaagaatcttcgagccggtgacgcggttcagttcttcaagtcgaccggaccggaccggcagctatatatagactgcaaggcgaggagtggtgaggttaacaataatgctggcggtttgtttgttccgattggaccggtcgttgagccggttcagatggttcggcttttcggggtcaaccttttgaaactacccgtacccggttcggatggtgtagggaagagaaaagagatggaactgtttgcatttgaatgttgcaagaagttaaaagtaattggagctttgtaacattacatagtgc

SEQ ID NO: 98 - protein, 351 aa, Glycine max
  G3452
MDGGCVTDETTTSSDSLSVPPPSRVGSVASAVVDPDGCCVSGEAESRKLPSSKYKGVVPQPNGRWGAQIYEKHQRVWLGTFNEEDEAARAYDIAALRFRGPDAVTNFKPPAASDDAESEFLNSHSKFEIVDMLRKHTYDDELQQSTRGGRRRLDADTASSGVFDAKAREQLFEKTVTPSDVGKLNRLVIPKQHAEKHFPLSGSGDESSPCVAGASAAKGMLLNFEDVGGKVWRFRYSYWNSSQSYVLTKGWSRFVKEKNLRAGDAVQFFKSTGPDRQLYIDCKARSGEVNNNAGGLFVPIGPVVEPVQMVRLFGVNLLKLPVPGSDGVGKRKEMELFAFECCKKLKVIGAL

SEQ ID NO: 99 - DNA, 1442 bp, Glycine max
  G3453
acgagtatagctcttaaaatactcaacaataaccaaacctaatcaaaacccttatctacactcacttcacacaaaccaaagttagttcgttaaccgttacaaacacaaaatggatggaggcagtgtcacagacgaaaccaccacaaccagcaactctctttcggttccggcgaatctatctccgccgcctctcagccttgacggaagcggcgcaaccgccgtcgtctaccccgacggttgttgcgtctccggcgaagccgaatcccggaaactcccgtcctcgaaatacaaaggcgtggtgccgcaaccgaacggtcgttggggagctcagatttacgagaagcaccagcgcgtgtggctcggcaccttcaacgaggaagacgaagccgtcagagcctacgacatcgtcgcgcatcgcttccgcggccgcgacgccgtcactaacttcaagcctctcgccggcgccgacgacgccgaagccgagttcctcagcacgcattccaagtccgagatcgtcgacatgctccgcaggcacacctacgacaacgagctccagcagagcacccgcggcggcaggcgccgccgggacgccgaaaccgcgtcgagcggcgcgttcgacgcgaaggcgcgtgagcagctggtcgagaaaaccgttacgccgagcgacgtcgggaagctgaaccgattagtgataccaaagcagcacgcggagaagcactttccgttaagcggatccggcggcggagccttgccgtgcatggcggcggctgcgggggcgaaaggaatgttgctgaactttgaggacgttggagggaaagtgtggcggttccgttactcgtattggaacagtagccagagctacgtgcttaccaaaggatggagccggttcgttaaggagaagaatcttcgagctggtgacgcggttcagttcttcaagtcgaccggactggaccggcaactatatatagactgcaaggcgaggagtggtaaggttaacaataatgctgccggtttgtttattccggttggaccggttgttgagccggttcagatggtacggcttttcggggtcgaccttttgaaactacccgtacccggttcggatggtattggggttggctgtgacgggaagagaaaagagatggagctgtttgcatttgaatgtagcaagaagttaaaagtaattggagctttgtaacattacatagtttttgagtttcttttgttaattttgtaactgttgaattcgtgaggtagagatggtgatggcgttgttgttgcaagttgccactcacaaaacgtgtatattcttaatttgatgggaaaaaaaaggagaaattagggcaagaagaattgtataatgcaaaggtttttttcaaaagaaaggaacatggagtgccactatttatttttgtaaaaaaacagagaaaagggcggcccgc

SEQ ID NO: 100 - protein, 362 aa, Glycine max
  G3453
MDGGSVTDETTTTSNSLSVPANLSPPPLSLDGSGATAVVYPDGCCVSGEAESRKLPSSKYKGVVPQPNGRWGAQIYEKHQRVWLGTFNEEDEAVRAYDIVAHRFRGRDAVTNFKPLAGADDAEAEFLSTHSKSEIVDMLRRHTYDNELQQSTRGGRRRRDAETASSGAFDAKAREQLVEKTVTPSDVGKLNRLVIPKQHAEKHFPLSGSGGGALPCMAAAAGAKGMLLNFEDVGGKVWRFRYSYWNSSQSYVLTKGWSRFVKEKNLRAGDAVQFFKSTGLDRQLYIDCKARSGKVNNNAAGLFIPVGPVVEPVQMVRLFGVDLLKLPVPGSDGIGVGCDGKRKEMELFAFECSKKLKVIGAL

SEQ ID NO: 101 - DNA, 1290 bp, Zea mays
  G3432
ctatagctagcactagcagtggtgcacactgaaatggacagcgccagcagcctcgtggacgacaccagtagcggtggcggcggcggcgcgtccacggacaagctaagggctctggccgtcttcgccgccgcctcggggacgccgctggagcgcatgggcagcggcgccagcgcggtcgtggacgcggccgagccgggcgccgaggcggactccggttccggtgccgccgcggtgagcgtcggcgggaagctgccgtcgtcaaggtacaagggcgtggtgccgcagcccaacgggcggtggggcgcgcagatctacgagcgccaccagcgcgtgtggctcggcaccttcgcgggcgaggccgacgcggcgcgcgcctacgacgtcgcggcgcagcggttccgcggccgcgacgcggtcaccaacttccgcccgctcgcggacgccgacccggacgccgccgccgagctccggttcctggcgtcccgctccaaggccgaggtcgtcgacatgctccgcaagcacacctacttcgacgagctcgcgcagaacaagcgcgccttcgccgccgcgtccgcgtccgcggccaccgcctcgtcgctggccaacaacccttcttcctacgcgtcgctctcccccgcgaccgcgacggccgccgcgcgggagcacctcttcgacaagacggtcacccccagcgacgtgggcaagctgaaccggctggtgatcccgaagcagcacgccgagaagcacttcccgctgcagctcccatccgccggcggcgagagcaagggcgtgctcctcaacctggaggacgccgcgggcaaggtgtggcggttccgctactcgtactggaacagcagccagagctacgtgctcaccaagggctggagccgcttcgtcaaggagaagggcctccaagccggcgacgtcgtcggcttctaccgctccgctgccggcgccgacaccaagctcttcatcgactgcaagctgcggcccaacagcgtcgtcgtcgcctcgacggcaggcccgtcgcctccggcgccggtggcgaaggccgtgcgtctcttcggcgtcgacctgctgacggcaccggccaccgccgcggcgccggcggaggccgtggccgggtgcaagagagccagggacttgggttcgcccccgcaggcggcgttcaagaagcagctcgtggagctggcactagtgtagattaatgctacggagcgatcgatctttccctggctagctagtcttttttttttttgctcgatcgctcaactcagatggtagcatcat

SEQ ID NO: 102 - protein, 389 aa, Zea mays
  G3432
MDSASSLVDDTSSGGGGGASTDKLRALAVFAAASGTPLERMGSGASAVVDAAEPGAEADSGSGAAAVSVGGKLPSSRYKGVVPQPNGRWGAQIYERHQRVWLGTFAGEADAARAYDVAAQRFRGRDAVTNFRPLADADPDAAAELRFLASRSKAEVVDMLRKHTYFDELAQNKRAFAAASASAATASSLANNPSSYASLSPATATAAAREHLFDKTVTPSDVGKLNRLVIPKQHAEKHFPLQLPSAGGESKGVLLNLEDAAGKVWRFRYSYWNSSQSYVLTKGWSRFVKEKGLQAGDVVGFYRSAAGADTKLFIDCKLRPNSVVVASTAGPSPPAPVAKAVRLFGVDLLTAPATAAAPAEAVAGCKRARDLGSPPQAAFKKQLVELALV

SEQ ID NO: 103 - DNA, 1068 bp, Oryza sativa (japonica cultivar-group)
  G3389
gctaggctgttctctctttccattcgtcaagaactaccacgacgtcgacatcataatcgtcagagagctcgagaaattttttagtatctttgatccagatcgatcatggagcaagaagctgccatggtcgtcttctcctgcaactccggctccggtgggtcgtcgtcgacgaccgattcaaagcaagaggaggaggaggaggaggagttggccgcaatggaggaagacgagttgatccacgtcgtccaggcggcggagctgcggctgccgtcgtcgacgacggcgacgcggccgtcgtcgcggtacaagggggtggtgccgcagccgaacgggcggtggggggcgcagatctacgagcggcacgcgcgggtgtggctcgggacgttccccgacgaggaggcggcggcgcgcgcctacgacgtggcggcgctccgcttccgggggcgcgacgccgtcaccaaccgcgccccggcggcggagggcgcgtccgccggcgagctcgcgttcctggccgcgcactccaaggcggaggtcgtggacatgctgcggaagcacacctacgacgacgagctccagcagggcctccgccgcggctcgcgcgcgcagccgacgccgcggtgggcgcgcgagccgctgttcgagaaggccgtgacgccgagcgacgtcggcaagctcaaccgcctcgtggtgcccaagcagcaggccgagaggcatttcccgttcccgctccgccgccacagctccgacgccgccggcaagggcgtgctcctcaacttcgaggacggcgacggcaaggtgtggcgattccggtactcgtactggaacagcagccagagttacgtgctcaccaaggggtggagccgattcgtgagggagaagggcctccgaccaggcgacaccgtggccttctcccggtcggcggcggcgtgggggacggagaagcacctcctcatcgactgcaagaagatggagaggaacaacctggcaaccgtcgacgacgatgcccgtgtcgtcgtcaagctgttcggcgttgacatcgccggagacaagacgaggtaacacgcaagc

SEQ ID NO: 104 - protein, 317 aa, Oryza sativa (japonica cultivar-group)
  G3389
MEQEAAMVVFSCNSGSGGSSSTTDSKQEEEEEEELAAMEEDELIHVVQAAELRLPSSTTATRPSSRYKGVVPQPNGRWGAQIYERHARVWLGTFPDEEAAARAYDVAALRFRGRDAVTNRAPAAEGASAGELAFLAAHSKAEVVDMLRKHTYDDELQQGLRRGSRAQPTPRWAREPLFEKAVTPSDVGKLNRLVVPKQQAERHFPFPLRRHSSDAAGKGVLLNFEDGDGKVWRFRYSYWNSSQSYVLTKGWSRFVREKGLRPGDTVAFSRSAAAWGTEKHLLIDCKKMERNNLATVDDDARVVVKLFGVDIAGDKTR

SEQ ID NO: 105 - DNA, 1246 bp, Arabidopsis thaliana
  G9
gtgtttcttctttctgctaaaaggttataatttttgtttcttggtttggtgagaatcttcaagaaactgaaacaaagaaaatggattctagttgcatagacgagataagttcctccacttcagaatctttctccgccaccaccgccaagaagctctctcctcctcccgcggcggcgttacgcctctaccggatgggaagcggcgggagcagcgtcgtgttggatcccgagaacggcctagagacggagtcacgaaagctaccatcttcaaaatacaaaggtgttgttcctcagcctaacggaagatggggagctcagatctacgagaagcaccaacgagtatggctcgggactttcaacgagcaagaagaagctgctcgttcctacgacatcgcagcttgtagattccgtggccgcgacgccgtcgtcaacttcaagaacgttctggaagacggcgatttagcttttcttgaagctcactcaaaggccgagatcgtcgacatgttgagaaaacacacttacgccgacgagcttgaacagaacaataaacggcagttgtttctctccgtcgacgctaacggaaaacgtaacggatcgagtactactcaaaacgacaaagttttaaagacgcgtgaagttcttttcgagaaggctgttacacctagcgacgttgggaagctaaaccgtctcgtgatacctaaacaacacgccgagaaacactttccgttaccgtcaccgtcaccggcagtgactaaaggagttttgatcaacttcgaagacgttaacggtaaagtgtggaggttccgttactcatactggaacagtagtcaaagttacgtgttgaccaagggatggagtcgattcgtcaaggagaagaatcttcgagccggtgatgttgttactttcgagagatcgaccggactagagcggcagttatatattgattggaaagttcggtctggtccgagagaaaacccggttcaggtggtggttcggcttttcggagttgatatctttaatgtgaccaccgtgaagccaaacgacgtcgtggccgtttgcggtggaaagagatctcgagatgttgatgatatgtttgcgttacggtgttccaagaagcaggcgataatcaatgctttgtgacatatttccttttccgattttatgctttcgttttttaatttttttttttgtcaagttgtgtaggttgtgattcatgctaggttgtatttaggaaaagagataagacc

SEQ ID NO: 106 - protein, 352 aa, Arabidopsis thaliana
  G9
MDSSCIDEISSSTSESFSATTAKKLSPPPAAALRLYRMGSGGSSVVLDPENGLETESRKLPSSKYKGVVPQPNGRWGAQIYEKHQRVWLGTFNEQEEAARSYDIAACRFRGRDAVVNFKNVLEDGDLAFLEAHSKAEIVDMLRKHTYADELEQNNKRQLFLSVDANGKRNGSSTTQNDKVLKTREVLFEKAVTPSDVGKLNRLVIPKQHAEKHFPLPSPSPAVTKGVLINFEDVNGKVWRFRYSYWNSSQSYVLTKGWSRFVKEKNLRAGDVVTFERSTGLERQLYIDWKVRSGPRENPVQVVVRLFGVDIFNVTTVKPNDVVAVCGGKRSRDVDDMFALRCSKKQAIINAL

SEQ ID NO: 107 - DNA, 1253 bp, Glycine max
  G3451
ctagaatccgtacaatctaatcaacataacaaaaatggatgcaattagttgcatggatgagagcaccaccactgagtcactctctataagtctttctccgacgtcatcgtcggagaaagcgaagccttcttcgatgattacatcgtcggagaaggtttctctgtccccgccgccgtcaaacagactatgccgtgttggaagcggcgcgagcgcagtcgtggatcctgatggcggcggcagcggcgctgaggtagagtcgcggaaactcccctcgtcgaagtacaagggcgtggtgccccagcccaacggccgctggggtgcgcagatttacgagaagcaccagcgcgtgtggcttggaacgttcaacgaggaagacgaggcggcgcgtgcgtacgacatcgccgcgcagcggttccgcggcaaggacgccgtcacgaacttcaagccgctcgccggcgccgacgacgacgacggagaatcggagtttctcaactcgcattccaaacccgagatcgtcgacatgctgcgaaagcacacgtacaatgacgagctggagcagagcaagcgcagccgcggcgtcgtccggcggcgaggctccgccgccgccggcaccgcaaactcaatttccggcgcgtgctttactaaggcacgtgagcagctattcgagaaggctgttacgccgagcgacgttgggaaattgaaccgtttggtgataccgaagcagcacgcggagaagcactttccgttacagagctctaacggcgttagcgcgacgacgatagcggcggtgacggcgacgccgacggcggcgaagggcgttttgttgaacttcgaagacgttggagggaaagtgtggcggtttcgttactcgtattggaacagtagccagagttacgtcttaaccaaaggttggagccggttcgttaaggagaagaatctgaaagctggtgacacggtttgttttcaccggtccactggaccggacaagcagctttacatcgattggaagacgaggaatgttgttaacaacgaggtcgcgttgttcggaccggtcggaccggttgtcgaaccgatccagatggttcggctctttggggttaacattttgaaactacccggttcagatactattgttggcaataacaataatgcaagtgggtgctgcaatggcaagagaagagaaatggaactgttctcgttagagtgtagcaagaaacctaagattattggtgctttgtaacgttacgttaggc

SEQ ID NO: 108 - protein, 401 aa, Glycine max
  G3451
MDAISCMDESTTTESLSISLSPTSSSEKAKPSSMITSSEKVSLSPPPSNRLCRVGSGASAVVDPDGGGSGAEVESRKLPSSKYKGVVPQPNGRWGAQIYEKHQRVWLGTFNEEDEAARAYDIAAQRFRGKDAVTNFKPLAGADDDDGESEFLNSHSKPEIVDMLRKHTYNDELEQSKRSRGVVRRRGSAAAGTANSISGACFTKAREQLFEKAVTPSDVGKLNRLVIPKQHAEKHFPLQSSNGVSATTIAAVTATPTAAKGVLLNFEDVGGKVWRFRYSYWNSSQSYVLTKGWSRFVKEKNLKAGDTVCFHRSTGPDKQLYIDWKTRNVVNNEVALFGPVGPVVEPIQMVRLFGVNILKLPGSDTIVGNNNNASGCCNGKRREMELFSLECSKKPKIIGAL

SEQ ID NO: 109 - DNA, 1291 bp, Oryza sativa (japonica cultivar-group)
  G3388
ctagacactgccctaattacaacccatttgcttatctctctcctctctctctctctctcgctgcagccatagcttagctagagctagagctttcttggtgccgagatgggggtggtcagcttctcctcgacttcctccggcgcgtccacggccaccaccgagtccggcggcgccgtgcggatgtcgccggagccggtggtggcggtggcggcggcggctcaacagctaccggtggtgaagggagttgactcggcggatgaggtggtgacgtcgaggccggcggcggcggcggcgcagcagtcgtcgcggtacaagggggtggtgccgcagccgaacgggaggtggggggcgcagatctacgagcggcacgcgcgggtgtggctcgggacgttccccgacgaggaggcggcggcgcgggcctacgacgtggcggcgctccggtaccgggggcgcgacgcggccaccaacttccccggggccgcggcgtcggccgccgagctcgcgttcctcgccgcgcactccaaggccgagatcgtcgacatgctccggaagcacacctacgccgacgagctccgccaggggctccgccgcggccgcggcatgggcgcccgcgcccagcccacgccgtcgtgggcgcgcgagccgctgttcgagaaggccgtgacgcccagcgacgtcggcaagctcaaccgcctcgtggtgcccaagcagcacgccgagaagcacttcccgctccgccgcgcggcgagctccgactccgcctccgccgccgccaccggcaagggcgtgctcctcaacttcgaggacggcgaggggaaggtgtggcgattccggtactcgtactggaacagcagccagagctacgtgctgaccaaggggtggagccgattcgtgagggagaagggcctccgcgccggcgacaccatagtcttctcccgctcggcgtacggccccgacaagctgctcttcatcgactgcaagaagaacaacgcggcggcggcgaccaccacctgcgccggcgacgagaggccaaccacaagcggcgccgaaccacgcgtcgtgaggctcttcggcgtcgacatcgccggcggcgattgccggaagcgggagagggcggtggagatggggcaagaggtcttcctactgaagaggcaatgcgtggttcatcagcgtactcctgccctaggtgccctgctgttatagcatcaaatcaaattcatatatagatcaaatcaaatcttcttctcttccatcttttttgttgttcatcgtctgttgtttcatcttcgag

SEQ ID NO: 110 - protein, 365 aa, Oryza sativa (japonica cultivar-group)
  G3388
MGVVSFSSTSSGASTATTESGGAVRMSPEPVVAVAAAAQQLPVVKGVDSADEVVTSRPAAAAAQQSSRYKGVVPQPNGRWGAQIYERHARVWLGTFPDEEAAARAYDVAALRYRGRDAATNFPGAAASAAELAFLAAHSKAEIVDMLRKHTYADELRQGLRRGRGMGARAQPTPSWAREPLFEKAVTPSDVGKLNRLVVPKQHAEKHFPLRRAASSDSASAAATGKGVLLNFEDGEGKVWRFRYSYWNSSQSYVLTKGWSRFVREKGLRAGDTIVFSRSAYGPDKLLFIDCKKNNAAAATTTCAGDERPTTSGAEPRVVRLFGVDIAGGDCRKRERAVEMGQEVFLLKRQCVVHQRTPALGALLL

SEQ ID NO: 111 - DNA, 1348 bp, Oryza sativa (japonica cultivar-group)
  G3390
cttcagaggcttcacctttcatcagcttagctagctagctgctcgatccggcggcgtgatcgatcgatctctctgattctatcaggtgttcgaccagattccatcgatggacagcacgagctgtctcttggacgacgcgagcagcggcgcgtccacgggcaagaaggcggcggcggcggcggcgtcgaaggcgctgcagcgcgtgggcagcggcgccagcgcggtgatggacgcggccgagcctggcgccgaggcggactcgggcggcgagcggcgcggcggcggcggcgggaagctgccgtcgtccaagtacaagggcgtggtgccgcaaccgaacgggcggtggggcgcgcagatatacgagcggcaccagcgggtgtggctcggcacgttcaccggcgaggcggaggcggcgcgcgcctacgacgtggcggcgcagcggttccgcggccgcgacgccgtcaccaacttccgcccgctcgccgagtccgacccggaggccgccgtcgagctccgcttcctcgcgtcccgctccaaggccgaggtcgtcgacatgctccgcaagcacacctacctcgaggagctcacgcagaacaagcgcgccttcgccgccatctccccgccgccccccaagcaccccgcctcctctccgacgtcctcctccgccgcgcgcgagcacctgttcgacaagacggtgacgcccagcgacgtcgggaagctgaaccggctggtgatccccaagcagcacgccgagaagcacttcccgctccagctccctccccctaccacaacctcctccgtcgccgccgccgccgacgccgccgccggcggcggcgattgcaagggcgtcctcctcaacttcgaggacgccgccgggaaggtgtggaaattccggtactcctactggaacagcagccagagctacgtgctcaccaaggggtggagccgcttcgtcaaggagaaggggctccacgccggcgacgccgtcggcttctaccgcgccgccggtaagaacgcgcagctcttcatcgactgcaaggtccgggcaaaacccaccaccgccgccgccgccgccgccttcctcagcgcggtggccgccgccgccgcgccgccacccgccgtgaaggctatcaggctgttcggtgtcgacctgctcacggcggcggcgccggagctgcaggacgccggcggcgccgccatgaccaagagcaagagagccatggacgccatggctgagtcacaagcacacgtggtttttaagaagcaatgcatagagcttgcgctaacctagctagcacgctgatgcagctagcgttttttttgctcattcgcttgcttgcttaattat

SEQ ID NO: 112 - protein, 394 aa, Oryza sativa (japonica cultivar-group)
  G3390
MDSTSCLLDDASSGASTGKKAAAAAASKALQRVGSGASAVMDAAEPGAEADSGGERRGGGGGKLPSSKYKGVVPQPNGRWGAQIYERHQRVWLGTFTGEAEAARAYDVAAQRFRGRDAVTNFRPLAESDPEAAVELRFLASRSKAEVVDMLRKHTYLEELTQNKRAFAAISPPPPKHPASSPTSSSAAREHLFDKTVTPSDVGKLNRLVIPKQHAEKHFPLQLPPPTTTSSVAAAADAAAGGGDCKGVLLNFEDAAGKVWKFRYSYWNSSQSYVLTKGWSRFVKEKGLHAGDAVGFYRAAGKNAQLFIDCKVRAKPTTAAAAAAFLSAVAAAAAPPPAVKAIRLFGVDLLTAAAPELQDAGGAAMTKSKRAMDAMAESQAHVVFKKQCIELALT

SEQ ID NO: 113 - DNA, 1327 bp, Arabidopsis thaliana
  G1073
tcaccgacccagctctttcacatatgtagacctctctctctctaattattcagtaaggttttgttctctcttgtcgtcttcttgttttgtccgtagcattattaataatcaaactcagtctctgaaatactctcagtgacaaaccacttctgtcgacttttgtctttgtctctcactagctataaccaaaaaaatccaaaaacccaaaccacagtttcttgtttttgttatcaatgtctagttatatgcaccctcttctagggcaagaactgcatctacagagacctgaagattccagaaccccacctgatcaaaataacatggaacttaacagatctgaagcagacgaagcaaaggccgagaccactcccaccggtggagccaccagctcagccacagcctctggctcttcctccggacgtcgtccacgtggtcgtcctgcaggttccaaaaacaaacccaaacctccgacgattataactagagatagtcctaacgtccttagatcacacgttcttgaagtcacctccggttcggacatatccgaggcagtctccacctacgccactcgtcgcggctgcggcgtttgcattataagcggcacgggtgcggtcactaacgtcacgatacggcaacctgcggctccggctggtggaggtgtgattaccctgcatggtcggtttgacattttgtctttgaccggtactgcgcttccaccgcctgcaccaccgggagcaggaggtttgacggtgtatctagccggaggtcaaggacaagttgtaggagggaatgtggctggttcgttaattgcttcgggaccggtagtgttgatggctgcttcttttgcaaacgcagtttatgataggttaccgattgaagaggaagaaaccccaccgccgagaaccaccggggtgcagcagcagcagccggaggcgtctcagtcgtcggaggttacggggagtggggcccaggcgtgtgagtcaaacctccaaggtggaaatggtggaggaggtgttgctttctacaatcttggaatgaatatgaacaattttcaattctccgggggagatatttacggtatgagcggcggtagcggaggaggtggtggcggtgcgactagacccgcgttttagagttttagcgttttggtgacaccttttgttgcgtttgcgtgtttgacctcaaactactaggctactagctatagcggttgcgaaatgcgaatattaggttttatttatttattttttgtttctcttaaaacttggtgtgtgaaaaaagaaaacgaacgcttaaatttcctttttctgtttgtttttatgaggcc

SEQ ID NO: 114 - protein, 299 aa, Arabidopsis thaliana
  G1073
MSSYMHPLLGQELHLQRPEDSRTPPDQNNMELNRSEADEAKAETTPTGGATSSATASGSSSGRRPRGRPAGSKNKPKPPTIITRDSPNVLRSHVLEVTSGSDISEAVSTYATRRGCGVCIISGTGAVTNVTIRQPAAPAGGGVITLHGRFDILSLTGTALPPPAPPGAGGLTVYLAGGQGQVVGGNVAGSLIASGPVVLMAASFANAVYDRLPIEEEETPPPRTTGVQQQQPEASQSSEVTGSGAQACESNLQGGNGGGGVAFYNLGMNMNNFQFSGGDIYGMSGGSGGGGGGATRPAF

SEQ ID NO: 115 - DNA, 918 bp, Oryza sativa (japonica cultivar-group)
  G3406
atggcaggtctcgacctcggcaccgccgcgacgcgctacgtccaccagctccaccacctccaccccgacctccagctgcagcacagctacgccaagcagcacgagccgtccgacgacgaccccaacggcagcggcggcggcggcaacagcaacggcgggccgtacggggaccatgacggcgggtcctcgtcgtcaggtcctgccaccgacggcgcggtcggcgggcccggcgacgtggtggcgcgccggccgcgggggcgcccgcctggctccaagaacaagccgaagccgccggtgatcatcacgcgggagagcgccaacacgctgcgcgcccacatcctggaggtcgggagcggctgcgacgtgttcgagtgcgtctccacgtacgcgcgccggcggcagcgcggcgtgtgcgtgctgagcggcagcggcgtggtcaccaacgtgacgctgcgtcagccgtcggcgcccgcgggcgccgtcgtgtcgctgcacgggaggttcgagatcctgtcgctctcgggctccttcctcccgccgccggctccccccggcgccaccagcctcaccatcttcctcgccgggggccagggacaggtcgtcggcggcaacgtcgtcggcgcgctctacgccgcgggcccggtcatcgtcatcgcggcgtccttcgccaacgtcgcctacgagcgcctcccactggaggaggaggaggcgccgccgccgcaggccggcctgcagatgcagcagcccggcggcggcgccgatgctggtggcatgggtggcgcgttcccgccggacccgtctgccgccggcctcccgttcttcaacctgccgctcaacaacatgcccggtggcggcggctcacagctccctcccggcgccgacggccatggctgggccggcgcacggccaccgttctga

SEQ ID NO: 116 - protein, 305 aa, Oryza sativa (japonica cultivar-group)
  G3406
MAGLDLGTAATRYVHQLHHLHPDLQLQHSYAKQHEPSDDDPNGSGGGGNSNGGPYGDHDGGSSSSGPATDGAVGGPGDVVARRPRGRPPGSKNKPKPPVIITRESANTLRAHILEVGSGCDVFECVSTYARRRQRGVCVLSGSGVVTNVTLRQPSAPAGAVVSLHGRFEILSLSGSFLPPPAPPGATSLTIFLAGGQGQVVGGNVVGALYAAGPVIVIAASFANVAYERLPLEEEEAPPPQAGLQMQQPGGGADAGGMGGAFPPDPSAAGLPFFNLPLNNMPGGGGSQLPPGADGHGWAGARPPF

SEQ ID NO: 117 - DNA, 1160 bp, Oryza sativa (japonica cultivar-group)
  G3399
cggtgaggagcgagttgtagaggaggaggggcaccgatcaaccgggaagctggcggccgggaagtggtgggagcggccagatgacacggccatggccgggatggaccctggcgggggcggcgccggcgccggcagctcacggtacttccaccatctgctccgaccgcagcagccgtcgccgctgtcaccgctgtcgccgacatcccatgtcaagatggagcactccaagatgtcacccgacaagagccccgtgggcgagggagatcacgcgggagggagtggaagcggcggcgtcggcggtgaccaccagccgtcgtcgtcggccatggtgcccgtcgagggtggcagcggcagcgccggcggtagtggctcgggtgggccgacgcggcgcccgcgcgggcgcccgcccgggtccaagaacaagccgaagccgcccatcatcgtgacgcgcgacagcccgaacgcgctgcactcgcacgtgctcgaggtcgccggcggcgccgacgtcgtcgactgcgtggccgagtacgcccgccgccgagggcgcggcgtgtgcgtgctgagcggcggcggcgccgtcgtcaacgtggcgctgcggcagccgggcgcgtcgccgccgggcagcatggtggccacgctgcggggccggttcgagatcctatctctcacgggcacggtcctgccgcctcccgcgccacccggcgcgagcggcctcaccgtgttcctctccggcggccagggccaggtgatcggcggcagcgtggtgggcccgctggtcgccgcggggcccgtcgtcctgatggcggcctcattcgcgaacgccgtgtacgagcggctgccgctggagggcgaggaagaggaggtcgccgcgcccgccgccggaggcgaagcacaagatcaagtggcacaatcagctggacccccagggcagcaaccggcggcgtcacagtcctccggcgtgacaggaggcgacggcaccggcggcgccggtggcatgtcgctctacaacctcgccgggaatgtgggaggctatcagctccccggagacaacttcggaggttggagcggcgccggcgccggcggagtcaggccaccgttctgacccatgtcttagcatccagttcaaaaattctccaaattaagaattgcgcagtgcaggc

SEQ ID NO: 118 - protein, 336 aa, Oryza sativa (japonica cultivar-group)
  G3399
MAGMDPGGGGAGAGSSRYFHHLLRPQQPSPLSPLSPTSHVKMEHSKMSPDKSPVGEGDHAGGSGSGGVGGDHQPSSSAMVPVEGGSGSAGGSGSGGPTRRPRGRPPGSKNKPKPPIIVTRDSPNALHSHVLEVAGGADVVDCVAEYARRRGRGVCVLSGGGAVVNVALRQPGASPPGSMVATLRGRFEILSLTGTVLPPPAPPGASGLTVFLSGGQGQVIGGSVVGPLVAAGPVVLMAASFANAVYERLPLEGEEEEVAAPAAGGEAQDQVAQSAGPPGQQPAASQSSGVTGGDGTGGAGGMSLYNLAGNVGGYQLPGDNFGGWSGAGAGGVRPPF

SEQ ID NO: 119 - DNA, 1473 bp, Arabidopsis thaliana
  G1067
tctcaagcttctctctcctttttttcccatagcacatcagaatcgctaaatacgactcctatgcaaagaagaagctacttctttctcttgccctaattaatctacctaactagggtttcctcttacctttcatgagagagatcatttaacataagtcaccttttttatatcttttgcttcgtctttaatttagttctgttcttggtctgtttctatattttgtcggcttgcgtaaccgatcacaccttaatgctttagctattgtttcctcaaaatcatgagttttgacttctcgatctgagttttctttttctctctttacgctcttcttcacctagctaccaatatatgaacgagcaggatcaagaatcgagaaattgatttgagctggcgaataagcagtggtgggatagggaattagtagatgcggcggcgatggaaggcggttacgagcaaggcggtggagcttctagatacttccataacctctttagaccggagattcaccaccaacagcttcaaccgcagggcgggatcaatcttatcgaccagcatcatcatcagcaccagcaacatcaacaacaacaacaaccgtcggatgattcaagagaatctgaccattcaaacaaagatcatcatcaacagggtcgacccgattcagacccgaatacatcaagctcagcaccgggaaaacgtccacgtggacgtccaccaggatctaagaacaaagccaagccaccgatcatagtaactcgtgatagccccaacgcgcttagatctcacgttcttgaagtatctcctggagctgacatagttgagagtgtttccacgtacgctaggaggagagggagaggcgtctccgttttaggaggaaacggcaccgtatctaacgtcactctccgtcagccagtcactcctggaaatggcggtggtgtgtccggaggaggaggagttgtgactttacatggaaggtttgagattctttcgctaacggggactgttttgccacctcctgcaccgcctggtgccggtggtttgtctatatttttagccggagggcaaggtcaggtggtcggaggaagcgttgtggctccccttattgcatcagctccggttatactaatggcggcttcgttctcaaatgcggttttcgagagactaccgattgaggaggaggaagaagaaggtggtggtggcggaggaggaggaggaggagggccaccgcagatgcaacaagctccatcagcatctccgccgtctggagtgaccggtcagggacagttaggaggtaatgtgggtggttatgggttttctggtgatcctcatttgcttggatggggagctggaacaccttcaagaccacctttttaattgaattttaatgtccggaaatttatgtgtttttatcatcttgaggagtcgtctttcctttgggatatttggtgtttaatgtttagttgatatgcatatttt

SEQ ID NO: 120 - protein, 311 aa, Arabidopsis thaliana
  G1067
MEGGYEQGGGASRYFHNLFRPEIHHQQLQPQGGINLIDQHHHQHQQHQQQQQPSDDSRESDHSNKDHHQQGRPDSDPNTSSSAPGKRPRGRPPGSKNKAKPPIIVTRDSPNALRSHVLEVSPGADIVESVSTYARRRGRGVSVLGGNGTVSNVTLRQPVTPGNGGGVSGGGGVVTLHGRFEILSLTGTVLPPPAPPGAGGLSIFLAGGQGQVVGGSVVAPLIASAPVILMAASFSNAVFERLPIEEEEEEGGGGGGGGGGGPPQMQQAPSASPPSGVTGQGQLGGNVGGYGFSGDPHLLGWGAGTPSRPPF

SEQ ID NO: 121 - DNA, 1596 bp, Glycine max
  G3459
ctgtcgcgtgggaaacaaatggctgcattgtgagttctttgtccccttcaacctcatttcaattctctctctcccccattcttacttcacccgcgccccctcccccgcccgctcccgtcccttttctttctctgcactccatctttctttccaaaacccacccttttctattcctcttcctcttcctccttttcccttctttttatttccttacactcacaacatttcccttaaaataaacataaacaaaccagcactgttcttgacccccaaaaaaaaaaaatctctactatttattaactatattaattcctccataatataatcatttgttttccttgttttctgttttctcttataatatataaccttcttttatctattttttctgttttgcaccttgtgattgtgagttatatctatttatatttatatatcattctctctcttttttttggatgtgtctatggctggtttggatttaggaagcgcctcacgctttgttcaaaaccttcacagaccagacttgcacttgcaacaaaatttccagcagcaccaggaccagcagcaccagcgtgatttggaggagcagaaaactcctccgaatcacagaatgggggcgccgttcgacgatgatagcgatgatagaagcccgggcctggagctcacttcaggtcctggcgacatcgtcggacggcgcccgcgtggcaggcctcctgggtcgaagaacaagcctaagccgcccgtcataatcacccgggagagcgccaacacgctgagggcgcacatcctcgaggtcggaagcggctccgacgtcttcgactgtgtcaccgcgtatgcccggcggcgccagcgtgggatctgcgtcctcagtggcagcggcaccgtcaccaatgtcagtctccggcagcctgcagctgccggtgccgtcgtcacgctgcacggcaggttcgagattctctccctctctggctcgttcctcccgccgccggctccgccgggagccaccagcctcacaatctacctggccggcgggcaggggcaggttgtcggaggaaacgtcatcggagaattaaccgcagcagggccagtaatcgtcatcgcagcgtcgttcaccaacgtggcttacgagaggttacccttagaagaagatgaacaacagcagcaacaacagcagcttcagattcagccacctgcaacgacgtcgtctcaaggaaacaacaacaacaataaccctttccccgacccttcttcaggacttcccttcttcaatttaccactcaatatgcagaatgttcagttaccagttgagggttgggctgtaaaccctgcttcacgtccacaacctttttgagagttcatgaagatgttgacggaggatttatatcacaaaaggctttatattattttaaggtcagcaaattaatattcatggactacaacatatatataaactatatgttttttcttcttcttcatgttattttgtttttttcttatgttgttaatggatataatatgacatgataattattatgtagtctgattttcatctccttggaattttatatacttatttcccctgttaaaaaaaaa

SEQ ID NO: 122 - protein, 295 aa, Glycine max
  G3459
MAGLDLGSASRFVQNLHRPDLHLQQNFQQHQDQQHQRDLEEQKTPPNHRMGAPFDDDSDDRSPGLELTSGPGDIVGRRPRGRPPGSKNKPKPPVIITRESANTLRAHILEVGSGSDVFDCVTAYARRRQRGICVLSGSGTVTNVSLRQPAAAGAVVTLHGRFEILSLSGSFLPPPAPPGATSLTIYLAGGQGQVVGGNVIGELTAAGPVIVIAASFTNVAYERLPLEEDEQQQQQQQLQIQPPATTSSQGNNNNNNPFPDPSSGLPFFNLPLNMQNVQLPVEGWAVNPASRPQPF

SEQ ID NO: 123 - DNA, 1143 bp, Oryza sativa (japonica cultivar-group)
  G3400
ctctgcaggtgaggtgaggtgaggggtgggatcgagggatcgagaagctggcggcgagcaagtggtgggagcgcgccgatgagggcgccatggccgggatggatcccaccggcggcggtggcggcggcggcgtggcggcgcactacctacacatgctccgcgcgcagcagcaccagccactgtccccggcaggtgacgtcaaggcggagcggtccatgctgtcgccggatgagagccccggcgcggacgccgacctaggatcggaccacccgacgtcgtcggccatggtggcggcggaggacagcggcggcggcagcggttcgggtggcccgatgcggcgcccccgcgggaggccgctgggctccaagaacaagcccaagccgcccatcatcgtgacgcgggacagccccaacgcgttccactcccacgtcctcgaggtcgccgcgggaaccgacatcgtcgagtgcgtctgcgagttcgcgcgccgccgcggccgcggcgtctccgtgctcagcggtggcggcgccgtcgccaacgtcgcgctccgccagccaggcgcgtcgcccccgggcagcctggtcgccaccatgcgcggccagttcgagatcctgtccctcacgggcaccgtcctcccgccgcccgcgccgcccagcgccagcggcctcaccgtcttcctctccggcgggcagggccaggtggtcggcgggagcgtggccggccagctcatcgccgcggggccagtcttcctcatggccgcctcgttcgccaatgccgtctacgagcgtctgccactcgatggggaggatccggaggcagaggctgccgccgccacccctcccggcgatgcggcgcagccaaccggcccaccaccaccgcagcagcagcccacagcctcgcagtcctctgaggtgaccgccggtgacggcggcggcggcggcggtctcggcatgtatcttggaggccatgtgggatcctaccagcagcagcagcagcaacttcccggaccaggagacaacttcggtagctggagcggcagcatcaggccgccgccattctgatccaaacacctcaaatcaagctctcccccaacaacgccatgcatgtctaaatcctcacaagattcactccaagaagacgaagctg

SEQ ID NO: 124 - protein, 322 aa, Oryza sativa (japonica cultivar-group)
  G3400
MAGMDPTGGGGGGGVAAHYLHMLRAQQHQPLSPAGDVKAERSMLSPDESPGADADLGSDHPTSSAMVAAEDSGGGSGSGGPMRRPRGRPLGSKNKPKPPIIVTRDSPNAFHSHVLEVAAGTDIVECVCEFARRRGRGVSVLSGGGAVANVALRQPGASPPGSLVATMRGQFEILSLTGTVLPPPAPPSASGLTVFLSGGQGQVVGGSVAGQLIAAGPVFLMAASFANAVYERLPLDGEDPEAEAAAATPPGDAAQPTGPPPPQQQPTASQSSEVTAGDGGGGGGLGMYLGGHVGSYQQQQQQLPGPGDNFGSWSGSIRPPPF

SEQ ID NO: 125 - DNA, 862 bp, Glycine max
  G3460
tatggctggtttggatttaggaagcgcgtcacgctttgttcagaatcttcacttaccggacttgcacttgcaacaaaattaccagcaaccccggcacaagcgcgattcggaggagcaagagactcctccgaacccgggaacagcgctggcgccgttcgacaacgatgatgacaaaagccagggcctggagctggcttcaggccctggggacatcgttggacggcgcccacgcggcagaccttccgggtccaagaacaagccgaagccaccggtgataatcacccgggagagcgccaacacgctgagggcgcacattctcgaggtaggaagcggctccgacgtcttcgactgtgtcaccgcttatgcgcggcggcgccagcgcgggatctgcgtcctcagcggcagtggtaccgtcaccaatgtcagtctccggcagcctgcggctgccggagccgtcgtcaggctgcacggaaggttcgagattctctctctctccggctcgttcctcccgccgccggctccgccgggagccaccagtctcacaatctacctcgccggcgggcagggccaggtcgtcggaggaaacgtcgtgggagaattaaccgcggcagggccagtaatcgtcatcgcagcatcgttcaccaacgtggcttacgagaggctccccttagaagaagatgaacaacaacaacaacagcttcagattcagtcacccgcaacgacgtcatctcaaggaaacaacaacaataaccctttccctgacccttcttcaggacttcccttcttcaacttaccactcaatatgcagaatgttcagttaccacctttttgagggttcatgaatctgataatatgagactga

SEQ ID NO: 126 - protein, 276 aa, Glycine max
  G3460
MAGLDLGSASRFVQNLHLPDLHLQQNYQQPRHKRDSEEQETPPNPGTALAPFDNDDDKSQGLELASGPGDIVGRRPRGRPSGSKNKPKPPVIITRESANTLRAHILEVGSGSDVFDCVTAYARRRQRGICVLSGSGTVTNVSLRQPAAAGAVVRLHGRFEILSLSGSFLPPPAPPGATSLTIYLAGGQGQVVGGNVVGELTAAGPVIVIAASFTNVAYERLPLEEDEQQQQQLQIQSPATTSSQGNNNNNPFPDPSSGLPFFNLPLNMQNVQLPPF

SEQ ID NO: 127 - DNA, 938 bp, Arabidopsis thaliana
  G1667
tcgacccatccctactcctcacaatcattcttttggtgtctctaccatttaataattcaccaaaatctccttacttaaactcacaaactcctcacaaattttctgaatctttcagttgaacatataacaacattcataacaatggctggaggtacagctctaactccaacctctgtaggatccaagtctgttccaatgaggaaccatgaagcaacagagagaggcaacaccaacaacaacctgagagcattacccaaagccgtccaaccggtttcatcaatcgaaggagagatggctaagaggccacgtggcagacccgctggctccaagaacaaacccaaaccaccaatcattgtgactcacgacagtccaaattccctcagagctaacgccgttgagatcagctcaggttgtgacatctgtgagactttatcggattttgcaagaaggaaacagagaggtctctgcattctcagtgccaatggttgtgtcaccaatgtgacattaaggcaaccagcttcatcaggagcaattgtcacattacacggacgttacgagatcctctcattgcttggatcaatcttgcctccaccagcaccacttggaataactggtctgaccatttacttagccggacctcaaggacaggttgttggtggaggagtggttggtgggctaatcgcatctggtcctgttgttctcatggctgcatctttcatgaatgctgtttttgatcgtcttcctatggatgatgatgaagctgcctctatgcagaaccagcagtactaccagaatggaagatcccgtcctttagatgacattcatggactgcctcaaaatctgctcactaatggaaactcggcttctgatatctactcttgggggccttggaatcaaagataaatgtgtctgtaggttgagagagaaccgtaagtctg

SEQ ID NO: 128 - protein, 253 aa, Arabidopsis thaliana
  G1667
MAGGTALTPTSVGSKSVPMRNHEATERGNTNNNLRALPKAVQPVSSIEGEMAKRPRGRPAGSKNKPKPPIIVTHDSPNSLRANAVEISSGCDICETLSDFARRKQRGLCILSANGCVTNVTLRQPASSGAIVTLHGRYEILSLLGSILPPPAPLGITGLTIYLAGPQGQVVGGGVVGGLIASGPVVLMAASFMNAVFDRLPMDDDEAASMQNQQYYQNGRSRPLDDIHGLPQNLLTNGNSASDIYSWGPWNQR

SEQ ID NO: 129 - DNA, 1361 bp, Arabidopsis thaliana
  G2156
ttttttttccctttcctcgttcaaaaaaagtacttgcagagtcactcactctcagtctcagcacatgaattaatttgaagcttccctagaattctttcacatcaattaatacgacaccgtctcgggtgaagaatctctcctctcttgccctaaagcgagttagggtttaacacacaaagcataccctttagatttgtgtctcttagctctgtttttgtcggcttgtgtaaccgatcaactcaagctattggctcctcacctcctgaaatttgacttctccaatggatctcaaagtttctcttatatgaattctatcttcaccctcacaatatctttatatatatgagccacaagaacaagaagagtcagtagatgcggctgccatggacggtggttacgatcaatccggaggagcttctagatactttcacaacctcttcaggcctgagcttcatcaccagcttcaacctcagcctcaacttcaccctttgcctcagcctcagcctcaacctcagcctcagcagcagaattcagatgatgaatctgactccaacaaggatccgggttccgacccagttacctctggttcaaccgggaaacgtccacgtggacgtcctccgggatccaagaacaagccgaagccaccggtgatagtgactagagatagccccaacgtgcttagatctcatgttcttgaagtctcatctggagccgacatagtcgagagcgttaccacttacgctcgcaggagaggaagaggagtctccattctcagtggtaacggcacggtggctaacgtcagtctccggcagccggcaacgacagcggctcatggggcaaatggtggaaccggaggtgttgtggctctacatggaaggtttgagatactttccctcacaggtacggtgttgccgccccctgcgccgccaggatccggtggtctttctatctttctttccggcgttcaaggtcaggtgattggaggaaacgtggtggctccgcttgtggcttcgggtccagtgatactaatggctgcatcgttctctaatgcaactttcgaaaggcttccccttgaagatgaaggaggagaaggtggagagggaggagaagttggagagggaggaggaggagaaggtggtccaccgccggccacgtcatcatcaccaccatctggagccggtcaaggacagttaagaggtaacatgagtggttatgatcagtttgccggtgatcctcatttgcttggttggggagccgcagccgcagccgcaccaccaagaccagccttttagaattgaaaattatgtccgtaacatagctgtaaccaaatttcatttctcaaaattaaaagaaaaaaaaaa

SEQ ID NO: 130 - protein, 302 aa, Arabidopsis thaliana
  G2156
MDGGYDQSGGASRYFHNLFRPELHHQLQPQPQLHPLPQPQPQPQPQQQNSDDESDSNKDPGSDPVTSGSTGKRPRGRPPGSKNKPKPPVIVTRDSPNVLRSHVLEVSSGADIVESVTTYARRRGRGVSILSGNGTVANVSLRQPATTAAHGANGGTGGVVALHGRFEILSLTGTVLPPPAPPGSGGLSIFLSGVQGQVIGGNVVAPLVASGPVILMAASFSNATFERLPLEDEGGEGGEGGEVGEGGGGEGGPPPATSSSPPSGAGQGQLRGNMSGYDQFAGDPHLLGWGAAAAAAPPRPAF

SEQ ID NO: 131 - DNA, 869 bp, Glycine max
  G3456
tcgacaacttcaacttttgttatggccaaccggtggtggaccgggtcggtgggtctagagaactctggccactcgatgaaaaaaccggatctggggttttccatgaacgagagtacggtgacggggaaccatataggagaagaagatgaggacagagaaaacagcgacgagccaagagagggagctattgacgtcgccaccacgcgccgccctaggggacgtccaccgggctccagaaacaagccgaaaccgccgatattcgtcacccgagacagccctaacgcgctgcggagccacgtcatggagattgccgtcggagccgacatcgccgactgcgtggcgcagttcgctcggaggcgccagcgcggggtttccattctcagcggcagcgggaccgtcgtcaacgtcaatctccggcaacccacggcacccggcgccgtcatggcgctccacggccgcttcgacatcctctccctcaccggctcctttctccctgggccgtcccctcccggcgccaccgggctcacaatctacctcgccggaggccaggggcagatcgtcggcggcggagtggtgggcccgctcgtggcggcgggccccgtattggtaatggcggctactttttccaatgctacgtatgaaagattgcctttagaggatgatgatcaggaacaacacggcggcggaggcggaggaggttcgccgcaggaaaaaaccgggggtcccggcgaggcgtcgtcgtcgatttcggtttataacaataatgttcctccgagtttaggtcttccgaatgggcaacatctgaaccatgaagcttattcttctccttggggtcattctcctcatgccagacctcctttctaattagc

SEQ ID NO: 132 - protein, 262 aa, Glycine max
  G3456
MKKPDLGFSMNESTVTGNHIGEEDEDRENSDEPREGAIDVATTRRPRGRPPGSRNKPKPPIFVTRDSPNALRSHVMEIAVGADIADCVAQFARRRQRGVSILSGSGTVVNVNLRQPTAPGAVMALHGRFDILSLTGSFLPGPSPPGATGLTIYLAGGQGQIVGGGVVGPLVAAGPVLVMAATFSNATYERLPLEDDDQEQHGGGGGGGSPQEKTGGPGEASSSISVYNNNVPPSLGLPNGQHLNHEAYSSPWGHSPHARPPF

SEQ ID NO: 133 - DNA, 987 bp, Oryza sativa (japonica cultivar-group)
  G3407
tcatcatcatcatcacttgcatatcgaattattaataatatcgaagatggcaggccttgatttgggcaccagctacctccaccaccaccaatcactgcatctccgccacgacgatggcggcgccggctccgacgacggcggccacgacgacctctcgccggggagcggcggtggcggcgggcccagcagcacggccggtggcgccgggatcggcggcggcgaggtcgtcgctcgccgcccccgcggccgcccgccgggctccaagaacaagcccaagccgccggtgatcatcaccagggagagcgccaacgcgctcagggcgcatatcctcgaggtagccgccggttgcgatgtgttcgaggcgctgacggcgtacgcgcgccgccggcagcgcggggtgtgcgtgctctcggcggcggggacagtggcgaacgtcacgctccggcagccgcagtcggcgcagcccgggccggcctcgccggcggtggcgacgctgcacggcaggttcgagatactctccctcgcgggctccttcctgcccccgcccgcgccgccgggcgccaccagcctcgccgcgttcctcgccggcgggcaggggcaggtcgtcggtggcagcgtcgccggcgcgctcatcgcggcggggcccgtcgtcgtcgtcgccgcgtcgttcagcaacgtggcgtacgagaggctgccgctcgaggacggcgacgaggtggtccccccggcgccggcagggagcgaccagggcggcggcggcagcggcggcatgccaccattaggcgttgatccgtcgggcggcgccgccaccggtgggctcccgttcttcaacatgccgttcgggatgccgccaatgccggtggacggccacgccggctggcctggcgccggcgtcgggaggccaccgttctcatgatggatggatccccatattccggcgagcggccggcggcgaggtggtcggcaagattgaagacatggacatgg

SEQ ID NO: 134 - protein, 289 aa, Oryza sativa (japonica cultivar-group)
  G3407
MAGLDLGTSYLHHHQSLHLRHDDGGAGSDDGGHDDLSPGSGGGGGPSSTAGGAGIGGGEVVARRPRGRPPGSKNKPKPPVIITRESANALRAHILEVAAGCDVFEALTAYARRRQRGVCVLSAAGTVANVTLRQPQSAQPGPASPAVATLHGRFEILSLAGSFLPPPAPPGATSLAAFLAGGQGQVVGGSVAGALIAAGPVVVVAASFSNVAYERLPLEDGDEVVPPAPAGSDQGGGGSGGMPPLGVDPSGGAATGGLPFFNMPFGMPPMPVDGHAGWPGAGVGRPPFS

SEQ ID NO: 135 - DNA, 1003 bp, Oryza sativa (japonica cultivar-group)
  G3401
ggatatataggccgcaggtagaagctggcgagccggtggtgggacgaggggcggctcagcctgccggtgacagccgccgacccatccctcggccttggcaacaacgacaccaccggcgccggtgacgacgacatggcgtccaaggagccaagcggcgaccacgaccacgagatgaacgggaccagcgccgggggcggcgagcccaaggacggcgcggtggtgaccggccgcaaccggcgcccccgcggacggccgccgggctccaagaacaagcccaagccgcccatcttcgtgacgcgggacagcccgaacgcgctgcgcagccacgtcatggaggtggccggcggcgccgatgtcgccgagtccatcgcgcacttcgcgcggcggcggcagcgcggcgtctgcgtgctcagcggggccggcaccgtgaccgacgtggccctgcgccagccggccgcgccgagcgccgtggtggcgctccgtgggcggttcgagatcctgtccctgacggggacgttcctgccggggccggcgccgccgggctccaccgggctgaccgtgtacctcgccggcgggcaggggcaggtggtgggcggcagcgtggtggggacgctcaccgcggcggggccggtcatggtgatcgcctccaccttcgccaacgccacctacgagaggctgccgctggatcaggaggaggaggaagcagcggcaggcggcatgatggcgccgccgccactcatggccggcgccgccgatccactacttttcggcgggggaatgcacgacgccgggcttgctgcatggcaccatgcccgccctccgccgccgccgccctactagctctctagctagattaattaattaagcttcatgaattaaatccttgcttaattaattggcatatatatatactcacatgatatatatgatcaacaagctatatatagctagccagctcgagctaattaattaacaaaaggtgagccaatataatgcaagatcg

SEQ ID NO: 136 - protein, 235 aa, Oryza sativa (japonica cultivar-group)
  G3401
MASKEPSGDHDHEMNGTSAGGGEPKDGAVVTGRNRRPRGRPPGSKNKPKPPIFVTRDSPNALRSHVMEVAGGADVAESIAHFARRRQRGVCVLSGAGTVTDVALRQPAAPSAVVALRGRFEILSLTGTFLPGPAPPGSTGLTVYLAGGQGQVVGGSVVGTLTAAGPVMVIASTFANATYERLPLDQEEEEAAAGGMMAPPPLMAGAADPLLFGGGMHDAGLAAWHHARPPPPPPY

SEQ ID NO: 137 - DNA, 1383 bp, Arabidopsis thaliana
  G2153
ttcttgcttagtatcattctttgtcgtgttcttttaattaaccttttgcaatttgtcttgtgtttctcacaacacaaaaacttgtaaaagtgttaaaaaatcaagatctgaaaaatcttatcaccgcttctaggtttttcagttttttttcttccttttcctgatctaaattaacttatatttcttagggtttcacttcttgaaacatttaatcagaattaattaacctctctagggctttcatggcgaatccatggtggacaggacaagtgaacctatccggcctcgaaacgacgccgcctggttcctctcagttaaagaaaccagatctccacatctccatgaacatggccatggactcaggtcacaataatcatcaccatcaccaagaagtcgataacaacaacaacgacgacgatagagacaacttgagtggagacgaccacgagccacgtgaaggagccgtagaagcccccacgcgccgtccacgtggacgtcctgctggttccaagaacaaaccaaagccaccgatcttcgtcactcgcgattctccaaatgctctcaagagccatgtcatggagatcgctagtgggactgacgtcatcgaaaccctagctacttttgctaggcggcgtcaacgtggcatctgcatcttgagcggaaatggcacagtggctaacgtcaccctccgtcaaccctcgaccgctgccgttgcggcggctcctggtggtgcggctgttttggctttacaagggaggtttgagattctttctttaaccggttctttcttgccaggaccggctccacctggttccaccggtttaacgatttacttagccggtggtcaaggtcaggttgttggaggaagcgtggtgggcccattgatggcagcaggtccggtgatgctgatcgccgccacgttctctaacgcgacttacgagagattgccattggaggaggaagaggcagcagagagaggcggtggtggaggcagcggaggagtggttccggggcagctcggaggcggaggttcgccactaagcagcggtgctggtggaggcgacggtaaccaaggacttccggtgtataatatgccgggaaatcttgtttctaatggtggcagtggtggaggaggacagatgagcggccaagaagcttatggttgggctcaagctaggtcaggattttaacgtgcgttaaaatggtttttaatttacagaagttaacaataagattataatgatgtttattatgatgatgaaaaccagtcagttgctacttgttactagtgagctatatagtttgtggacattatattatgttctctcttgactatgattattatttgctaaatttcacttagctaaaaaaaaaaaaaaaaaa

SEQ ID NO: 138 - protein, 315 aa, Arabidopsis thaliana
  G2153
MANPWWTGQVNLSGLETTPPGSSQLKKPDLHISMNMAMDSGHNNHHHHQEVDNNNNDDDRDNLSGDDHEPREGAVEAPTRRPRGRPAGSKNKPKPPIFVTRDSPNALKSHVMEIASGTDVIETLATFARRRQRGICILSGNGTVANVTLRQPSTAAVAAAPGGAAVLALQGRFEILSLTGSFLPGPAPPGSTGLTIYLAGGQGQVVGGSVVGPLMAAGPVMLIAATFSNATYERLPLEEEEAAERGGGGGSGGVVPGQLGGGGSPLSSGAGGGDGNQGLPVYNMPGNLVSNGGSGGGGQMSGQEAYGWAQARSGF

SEQ ID NO: 139 - DNA, 1116 bp, Arabidopsis thaliana
  G1069
ttggaaccctagaggcctttcaagcaaatcatcagggtaacaatttcttgatctttctttttagcgaatttccagtttttggtcaatcatggcaaacccttggtggacgaaccagagtggtttagcgggcatggtggaccattcggtctcctcaggccatcaccaaaaccatcaccaccaaagtcttcttaccaaaggagatcttggaatagccatgaatcagagccaagacaacgaccaagacgaagaagatgatcctagagaaggagccgttgaggtggtcaaccgtagaccaagaggtagaccaccaggatccaaaaacaaacccaaagctccaatctttgtgacaagagacagccccaacgcactccgtagccatgtcttggagatctccgacggcagtgacgtcgccgacacaatcgctcacttctcaagacgcaggcaacgcggcgtttgcgttctcagcgggacaggctcagtcgctaacgtcaccctccgccaagccgccgcaccaggaggtgtggtctctctccaaggcaggtttgaaatcttatctttaaccggtgctttcctccctggaccttccccacccgggtcaaccggtttaacggtttacttagccggggtccagggtcaggtcgttggaggtagcgttgtaggcccactcttagccatagggtcggtcatggtgattgctgctactttctctaacgctacttatgagagattgcccatggaagaagaggaagacggtggcggctcaagacagattcacggaggcggtgactcaccgcccagaatcggtagtaacctgcctgatctatcagggatggccgggccaggctacaatatgccgccgcatctgattccaaatggggctggtcagctagggcacgaaccatatacatgggtccacgcaagaccaccttactgactcagtgagccatttctatatataatggtctatataaataaatatatagatgaatataagcaagcaatttgaggtagtctattacaaagcttttgctctggttggaaaaataaataagtatcaaagctttgtttgttcttaatggaaatatagagcttgggaaggtagaaagagacgacatt

SEQ ID NO: 140 - protein, 281 aa, Arabidopsis thaliana
  G1069
MANPWWTNQSGLAGMVDHSVSSGHHQNHHHQSLLTKGDLGIAMNQSQDNDQDEEDDPREGAVEVVNRRPRGRPPGSKNKPKAPIFVTRDSPNALRSHVLEISDGSDVADTIAHFSRRRQRGVCVLSGTGSVANVTLRQAAAPGGVVSLQGRFEILSLTGAFLPGPSPPGSTGLTVYLAGVQGQVVGGSVVGPLLAIGSVMVIAATFSNATYERLPMEEEEDGGGSRQIHGGGDSPPRIGSNLPDLSGMAGPGYNMPPHLIPNGAGQLGHEPYTWVHARPPY

SEQ ID NO: 141 - DNA, 803 bp, Oryza sativa (japonica cultivar-group)
  G3556
tcgacgggatggggagcatcgacggccactcgctgcagcagcatcaggggtactcccacggcggcggcgcgggagggagcaacgaggaggaggaggcgtcgccgccgcccggcggtggctcggctacggggtcggcgggccgccggccgagggggaggccgccgggctccaagaacaagccgaagccgcccgtcgtggtgacgcgggagagccccaacgcgatgcgttcccacgtgctggagatcgccagcggcgccgacatcgtcgaggccatcgcgggcttctcccgccgcaggcagcgcggcgtctccgtgctcagcgggagcggcgccgtcaccaacgtcacgctccggcagcccgcggggactggggccgccgccgtcgcgctgcgggggaggttcgagatattgtccatgtctggcgccttcctcccggcgccggcgccgccaggggccacggggctcgccgtgtacctcgccggcgggcaggggcaggtggtgggtgggagcgtcatgggggagctgatcgcgtcgggccccgtcatggtgatcgcggccacgttcggcaacgccacgtacgagaggctgccgctggaccaggaaggcgaggagggcgccgtgctgtccgggtcggagggcgccgccgcgcagatggagcagcagagcagcggaggcgccgtcgtgcccccgccgatgtacgccgccgtccagcagacgccgccgcacgacatgttcgggcagtgggggcatgcagcggtggctcggccgccgccgacatcgttctagcactggcaccggttaatt

SEQ ID NO: 142 - protein, 258 aa, Oryza sativa (japonica cultivar-group)
  G3556
MGSIDGHSLQQHQGYSHGGGAGGSNEEEEASPPPGGGSATGSAGRRPRGRPPGSKNKPKPPVVVTRESPNAMRSHVLEIASGADIVEAIAGFSRRRQRGVSVLSGSGAVTNVTLRQPAGTGAAAVALRGRFEILSMSGAFLPAPAPPGATGLAVYLAGGQGQVVGGSVMGELIASGPVMVIAATFGNATYERLPLDQEGEEGAVLSGSEGAAAQMEQQSSGGAVVPPPMYAAVQQTPPHDMFGQWGHAAVARPPPTSF

SEQ ID NO: 143 - DNA, 1496 bp, Arabidopsis thaliana
  G2157
tcttttgattttaaccttttttcagtagcaagccaaaaaaaaaaaacagacaaagaagttccttttatgataaaggtatgatgatagcaaacaaatgatacccccatgtcttgtgtgtctgcttcatgcaacatgttggtttggatttggttaatctaaaagtttaagataaggttttcggattctcttcctgtcttgtaatagtttcttgtcggagagccatcaacaccaacttcaacaaaaaaaacaagaaaaagaaaaagattctctttctcgttttatttccattagagaagaaaaaaagaatggcgaatccttggtgggtagggaatgttgcgatcggtggagttgagagtccagtgacgtcatcagctccttctttgcaccacagaaacagtaacaacaacaacccaccgactatgactcgttcggatccaagattggaccatgacttcaccaccaacaacagtggaagccctaatacccagactcagagccaagaagaacagaacagcagagacgagcaaccagctgttgaacccggatccggatccgggtctacgggtcgtcgtcctagaggtagacctcctggttccaagaacaaaccaaagagtccagttgttgttaccaaagaaagccctaactctctccagagccatgttcttgagattgctacgggagctgacgtggcggaaagcttaaacgcctttgctcgtagacgcggccggggcgtttcggtgctgagcggtagtggtttggttactaatgttactctgcgtcagcctgctgcatccggtggagttgttagtttacgtggtcagtttgagatcttgtctatgtgtggggcttttcttcctacgtctggctctcctgctgcagccgctggtttaaccatttacttagctggagctcaaggtcaagttgtgggaggtggagttgctggcccgcttattgcctctggacccgttattgtgatagctgctacgttttgcaatgccacttatgagaggttaccgattgaggaagaacaacagcaagagcagccgcttcaactagaagatgggaagaagcagaaagaagagaatgatgataacgagagtgggaataacggaaacgaaggatcgatgcagccgccgatgtataatatgcctcctaattttatcccaaatggtcatcaaatggctcaacacgacgtgtattggggtggtcctccgcctcgtgctcctccttcgtattgattagttagataggcggtggttggtgcgttctttttactggaatgattatattttccattaggatggttaggcttttgtttattaaagctatcaagtttcttttttttttacggataattcggatgacaattagctagtgtttgtttgtttgttttgtggcggcttttctgacttgactattttgatcgcggatagctttgtatgaaagtgaattgattgtagaatcgtcttttgaattttgatgttggaaaaaaccaa

SEQ ID NO: 144 - protein, 310 aa, Arabidopsis thaliana
  G2157
MANPWWVGNVAIGGVESPVTSSAPSLHHRNSNNNNPPTMTRSDPRLDHDFTTNNSGSPNTQTQSQEEQNSRDEQPAVEPGSGSGSTGRRPRGRPPGSKNKPKSPVVVTKESPNSLQSHVLEIATGADVAESLNAFARRRGRGVSVLSGSGLVTNVTLRQPAASGGVVSLRGQFEILSMCGAFLPTSGSPAAAAGLTIYLAGAQGQVVGGGVAGPLIASGPVIVIAATFCNATYERLPIEEEQQQEQPLQLEDGKKQKEENDDNESGNNGNEGSMQPPMYNMPPNFIPNGHQMAQHDVYWGGPPPRAPPSY

SEQ ID NO: 145 - DNA, 1064 bp, Oryza sativa (japonica cultivar-group)
  G3408
gtggttttggttgattgctactctgtgccatgtcgttctgcgagagggacatgaacaaggagagcatgtaccaagaacgggacgacatggcggggatacggttcgcgacgccgccgctgcctcagcagcagcagcagcagcagctggtggagtgcttctccgacgaggtggacagccgcgggagtggcggcgagatgaaggatgccgtggggagcgggagtgggcagctggtcgttgttggtggcggggatggggcgagcatcgaggtggcgaagaagaggagggggaggccgccggggtccaagaacaagccgaagccacccgtggtgatcacgcgggaggcggagccggcggcggcgatgcggccgcacgtgatcgagatccccggcgggcgggacgtcgcggaggcgctcgcgcggttctcgagccgtcggaacctcgggatctgcgtgctcgccggcaccggcgcggtcgccaacgtgtcgctccgccacccgtcacccggggtcccgggctcagctccggctgcgatcgtgttccacggccggtacgagatcctctccctgtcggccacgttcctgcctccggccatgtcctccgtggcgccccaggccgcggtcgccgccgcgggcctctccatctcgctcgccggcccgcacggccagatcgtcggcggggccgtggcaggcccgctctacgccgcgaccaccgtcgtggtcgtcgccgccgccttcaccaaccccaccttccaccgcctccccgccgacgacgacgcgtcggtgtccgtctcggtgtcactctccggcagcggcgacgcggacgaacaccggggccaccagcacaaacctgagccgcaagaaccgcgccaacttcgacggccgccaccgcacctgtcagcagccgccgccgtctcagcagcacagccggtggagccatgcggcgcgcccatgtacgcctgccaccctcagccacaggaggtgatgtggccgccgccggctcgtacgccgcacccgccgccgccgccgccgtactaatccgaccgaattggtacgccattgccacat

SEQ ID NO: 146 - protein, 334 aa, Oryza sativa (japonica cultivar-group)
  G3408
MSFCERDMNKESMYQERDDMAGIRFATPPLPQQQQQQQLVECFSDEVDSRGSGGEMKDAVGSGSGQLVVVGGGDGASIEVAKKRRGRPPGSKNKPKPPVVITREAEPAAAMRPHVIEIPGGRDVAEALARFSSRRNLGICVLAGTGAVANVSLRHPSPGVPGSAPAAIVFHGRYEILSLSATFLPPAMSSVAPQAAVAAAGLSISLAGPHGQIVGGAVAGPLYAATTVVVVAAAFTNPTFHRLPADDDASVSVSVSLSGSGDADEHRGHQHKPEPQEPRQLRRPPPHLSAAAAVSAAQPVEPCGAPMYACHPQPQEVMWPPPARTPHPPPPPPY

SEQ ID NO: 147 - DNA, 964 bp, Arabidopsis thaliana
  G28
gaaatctcaacaagaaccaaaccaaacaacaaaaaaacattcttaataattatctttctgttatgtcgatgacggcggattctcaatctgattatgcttttcttgagtccatacgacgacacttactaggagaatcggagccgatactcagtgagtcgacagcgagttcggttactcaatcttgtgtaaccggtcagagcattaaaccggtgtacggacgaaaccctagctttagcaaactgtatccttgcttcaccgagagctggggagatttgccgttgaaagaaaacgattctgaggatatgttagtttacggtatcctcaacgacgcctttcacggcggttgggagccgtcttcttcgtcttccgacgaagatcgtagctctttcccgagtgttaagatcgagactccggagagtttcgcggcggtggattctgttccggtcaagaaggagaagacgagtcctgtttcggcggcggtgacggcggcgaagggaaagcattatagaggagtgagacaaaggccgtgggggaaatttgcggcggagattagagatccggcgaagaacggagctagggtttggttaggaacgtttgagacggcggaggacgcggcgttggcttacgacagagctgctttcaggatgcgtggttcccgcgctttgttgaattttccgttgagagttaattcaggagaacccgacccggttcgaatcaagtccaagagatcttctttttcttcttctaacgagaacggagctccgaagaagaggagaacggtggccgccggtggtggaatggataagggattgacggtgaagtgcgaggttgttgaagtggcacgtggcgatcgtttattggttttataattttgatttttctttgttggatgattatatgattcttcaaaaaagaagaacgttaataaaaaaattcgtttattattaaaaaaaaaaaaaaaaaa

SEQ ID NO: 148 - protein, 268 aa, Arabidopsis thaliana
  G28
MSMTADSQSDYAFLESIRRHLLGESEPILSESTASSVTQSCVTGQSIKPVYGRNPSFSKLYPCFTESWGDLPLKENDSEDMLVYGILNDAFHGGWEPSSSSSDEDRSSFPSVKIETPESFAAVDSVPVKKEKTSPVSAAVTAAKGKHYRGVRQRPWGKFAAEIRDPAKNGARVWLGTFETAEDAALAYDRAAFRMRGSRALLNFPLRVNSGEPDPVRIKSKRSSFSSSNENGAPKKRRTVAAGGGMDKGLTVKCEVVEVARGDRLLVL

SEQ ID NO: 149 - DNA, 783 bp, Brassica oleracea
  G3659
caaaaatataatggcggcagaatccgactacattttgcttgagtcgataagacgacacttactaggagaatcggagtcgtggctcagtgagtcgacggcgagttcggtggttcaatctggtacgacggccaaaccggtgtacggaagaaaccctagcttcagcaagttgtacccttgcttcactgagagctggggacacttgccgttgaaagaaaacgacacggaggacatgttagtctacggtatcctcaacgacgcgtttcacggcggatgggaaccgtcgtcttcatcctccgacgaagaccagagctctaattttccgaaggttaaaaccgagaacttcacggtggtcgatcatgttccggcgaagaaggcgagtccggttaaggctccggagaaggggaagcattacagaggagtgaggcagaggccgtgggggaagttcgcggcggagataagggatccggcgaagaacggagctagggtttggttggggacgtttgagacggcggaagatgcagcgttggcttacgacagagctgctttcaggatgcgtggttcccgcgctcttttgaattttcctttgagggttaactcaggtgaacctgacccggttcgggttaagtcaaagagaggttcttcctctgaaatcggaggttcgaagcggagaagaacggtggcttctgtaaacggcggcggtcaaggaacagatatggggttgatggtcaagtgtgaggtggttgaagtgagacgtgacgatcatttacttgtcttatagttttt

SEQ ID NO: 150 - protein, 255 aa, Brassica oleracea
  G3659
MAAESDYILLESIRRHLLGESESWLSESTASSVVQSGTTAKPVYGRNPSFSKLYPCFTESWGHLPLKENDTEDMLVYGILNDAFHGGWEPSSSSSDEDQSSNFPKVKTENFTVVDHVPAKKASPVKAPEKGKHYRGVRQRPWGKFAAEIRDPAKNGARVWLGTFETAEDAALAYDRAAFRMRGSRALLNFPLRVNSGEPDPVRVKSKRGSSSEIGGSKRRRTVASVNGGGQGTDMGLMVKCEVVEVRRDDHLLVL

SEQ ID NO: 151 - DNA, 913 bp, Arabidopsis thaliana
  G1006
gataaatcaatcaacaaaacaaaaaaaactctatagttagtttctctgaaaatgtacggacagtgcaatatagaatccgactacgctttgttggagtcgataacacgtcacttgctaggaggaggaggagagaacgagctgcgactcaatgagtcaacaccgagttcgtgtttcacagagagttggggaggtttgccattgaaagagaatgattcagaggacatgttggtgtacggactcctcaaagatgccttccattttgacacgtcatcatcggacttgagctgtctttttgattttccggcggttaaagtcgagccaactgagaactttacggcgatggaggagaaaccaaagaaagcgataccggttacggagacggcagtgaaggcgaagcattacagaggagtgaggcagagaccgtgggggaaattcgcggcggagatacgtgatccggcgaagaatggagctagggtttggttagggacgtttgagacggcggaagatgcggctttagcttacgatatagctgcttttaggatgcgtggttcccgcgctttattgaattttccgttgagggttaattccggtgaacctgacccggttcggatcacgtctaagagatcttcttcgtcgtcgtcgtcgtcgtcctcttctacgtcgtcgtctgaaaacgggaagttgaaacgaaggagaaaagcagagaatctgacgtcggaggtggtgcaggtgaagtgtgaggttggtgatgagacacgtgttgatgagttattggtttcataagtttgatcttgtgtgttttgtagttgaatagttttgctataaatgttgaggcaccaagtaaaagtgttcccgtgatgtaaattagttactaaacagagccatatatcttcaatcaaaaaaaaaaaaaaaa

SEQ ID NO: 152 - protein, 243 aa, Arabidopsis thaliana
  G1006
MYGQCNIESDYALLESITRHLLGGGGENELRLNESTPSSCFTESWGGLPLKENDSEDMLVYGLLKDAFHFDTSSSDLSCLFDFPAVKVEPTENFTAMEEKPKKAIPVTETAVKAKHYRGVRQRPWGKFAAEIRDPAKNGARVWLGTFETAEDAALAYDIAAFRMRGSRALLNFPLRVNSGEPDPVRITSKRSSSSSSSSSSSTSSSENGKLKRRRKAENLTSEVVQVKCEVGDETRVDELLVS

SEQ ID NO: 153 - DNA, 798 bp, Glycine max
  G3717
ggagaccaccggagatatgtacggacggagtgattcttacgaatccgatttggcgcttctggattcgattcgccgccacttgctgggagagtccgaattgatattcggagccccgaatttcggttcgggtcggagctccagtttcagcagcttggactcgtgtttgagtgatgattggggagagcttccgtttaaggaggacgattcagaagatatggtgttgtacggcgttctccgtgacgcagttaatgtggggtgggtcccatccctcgatgccggctcgcccgagagcgtctcgtcgggttttccggcggtgaagctggagcctgatgtcatgccggcgttgattaatccgtgtccgcctccggcgccggcggtggaggagaagaaggttgttccgccgaaggggaagcactaccgcggcgtgcggcagcggccgtggggaaagttcgcggcggagatccgggacccggcgaagaacggggctagggtttggctggggacgtttgagacggcggaggacgcggcgttggcgtacgaccgcgccgcctaccggatgcgagggtcgagggcgctgctgaattttccgttgagggttaactccggcgagccagatccggtgagggtgacgtcgaagcggtcgtcgtcgccggaaagtatggcggcggcggcgccgaagagaaagaaagttatggtggtggggacggtgcaagagcaagtggggagtcaagtggtggagtgtacacgtggcgaacagttattggttagctgagagagattctaaaattggtattgtgt

SEQ ID NO: 154 - protein, 251 aa, Glycine max
  G3717
MYGRSDSYESDLALLDSIRRHLLGESELIFGAPNFGSGRSSSFSSLDSCLSDDWGELPFKEDDSEDMVLYGVLRDAVNVGWVPSLDAGSPESVSSGFPAVKLEPDVMPALINPCPPPAPAVEEKKVVPPKGKHYRGVRQRPWGKFAAEIRDPAKNGARVWLGTFETAEDAALAYDRAAYRMRGSRALLNFPLRVNSGEPDPVRVTSKRSSSPESMAAAAPKRKKVMVVGTVQEQVGSQVVECTRGEQLLVS

SEQ ID NO: 155 - DNA, 1013 bp, Glycine max
  G3718
cacgaaatgtacggacaaagtagctatgagtccgatttggcccttttggactccattcgccgccacttactcggcgactccgaggaacacagattcggagccccgaatgttaattcgggtagcactccattgtactctcggagctccagtttcggcaggttgtacccttgcctgagtaacgattggggcgaacttcctcttatggaagacgattcagaagacatgcttctttatggtgttcttcgcgacgccgtgaacgtaggctgggtcccatctctcgacgcttcctcaccggagagtttctcgtcggctttcatgccgccggtgaccgtgaaatccgaaacggatctatttccggcaccggaaccgatttgtaaccctccggtggttcagggcccggcgccggcggtagttccggcgaaagggaagcactaccggggcgtgcggcagcgaccgtggggaaaattcgcagcggagatccgcgacccggctaaaaatggggctcgggtttggcttgggacttttgagacggctgaggacgccgcgctggcttacgatcgagccgcgtatcgaatgcgcggctcgcgggctttgttgaattttccgctccggattaattcgggcgagcccgaaccggttcgagttacggcgaagcgggcttcagcagaaccgtgttcttcgtcggagagtggatcttgggtgaagaagcggaagaaggtggtgggttgagaacggggcacgtggagagcagttgttggtgaagtaatttgtgatgctaaaaaggggtggaataaatgggttggcatgctcactcattgctcaagtgggactgtgggactgatcaaatctaaagctaaaaaagaaaacaaaccacatttggaaaaactgattagggtcgaggttctgtttggctttgtgaatacagttacaagatttcttattttttggttcaattctataataatatctgtaacatagttgggtagggcacccaccctgtgctgaactaagtt

SEQ ID NO: 156 - protein, 240 aa, Glycine max
  G3718
MYGQSSYESDLALLDSIRRHLLGDSEEHRFGAPNVNSGSTPLYSRSSSFGRLYPCLSNDWGELPLMEDDSEDMLLYGVLRDAVNVGWVPSLDASSPESFSSAFMPPVTVKSETDLFPAPEPICNPPVVQGPAPAVVPAKGKHYRGVRQRPWGKFAAEIRDPAKNGARVWLGTFETAEDAALAYDRAAYRMRGSRALLNFPLRINSGEPEPVRVTAKRASAEPCSSSESGSWVKKRKKVVG

SEQ ID NO: 157 - DNA, 703 bp, Brassica oleracea
  G3660
tctgtaataataatgtacggacatggcgagataaccacggcagcagaatcagattacgctttgctggagtcaatacgacgtcacttgctaggtggagacaacgagttacgattcagtgagtcaataccgagttcatgtttcactcagagttggggagacttgccattgaaagagaacgactccgaggatatgttagtgtacagtgtcctcaacgacgccttcaacggagcctttgaaacgtcgtcgccgtcgtcggacttgagctgtctcagcgattttaacgattttccggcggttaaaatggaaacttcggagaacttagcagcggaggcggaaaaaatgaaggcggtggcggcgccgccgtcaaagggaaagcattacagaggggtgagacagaggccgtgggggaaattcgcggcggagatacgtgatccggcgaaaaaaggagcgagggaatggttagggacgtttgagacggcggaagatgcagctttggcttacgatagagctgcttttaggatgcgtggttcccgcgctttgttgaattttccgttgagggttaactccggtgaacctgacccggtaaggatcaagtcaaagaggtcttataagtcttcttcgtcgtcctcttctgaaaacgggaagccgaagcagaggagaagaacagagaacgtgccatagttcaggtgaagggcgatgttgt

SEQ ID NO: 158 - protein, 222 aa, Brassica oleracea
  G3660
MYGHGEITTAAESDYALLESIRRHLLGGDNELRFSESIPSSCFTQSWGDLPLKENDSEDMLVYSVLNDAFNGAFETSSPSSDLSCLSDFNDFPAVKMETSENLAAEAEKMKAVAAPPSKGKHYRGVRQRPWGKFAAEIRDPAKKGAREWLGTFETAEDAALAYDRAAFRMRGSRALLNFPLRVNSGEPDPVRIKSKRSYKSSSSSSSENGKPKQRRRTENVP

SEQ ID NO: 159 - DNA, 957 bp, Oryza sativa (japonica cultivar-group)
  G3848
atgacggcgcgaagcatgttgcggaaccacccggaggcgtcggtgctcgacaccatccggcagcacctgctggaggagccgcgcggcggcggcggtggcgaggcggcggaggcgagcttcgggagcctggtggccgacatgtggagcgactcgctgccgttccgcgacgacgacgccgacgacatggtggtgttcggcgcgatgcgggacgcgttctcgtgcgggtggctgcccgacggcgtgttcgcggaggtgaagccggagcccctgctctcgccggactcgtcgtcgtacgacgggtcctcttgctgcttcggcttcgcggacgtgtcggagccggtgacgccgagcgacgcggcgtcgggggcggcagaagcggcggccgcggcggcggcggcgacggcggagcacgggaaggaggaggaggccgcggctgcggtggcgagggggaagcactacaggggggtgaggcagcggccgtggggcaagttcgcggcggagatccgggaccccgccaagaacggcgcgcgcgtgtggctcggcacgttcgacaccgccgaggacgccgccctggcgtacgaccgcgccgcctaccgcatgcgtggctcccgcgcgctcctcaacttcccgctccgcatcggctcggagatcgcagccgccgccgccgccgcagcggcagcggcagccggcgacaagcggccgtcgccggagccggcgacctcggagtcgtccttctcctcctcatcctcctgcaccaccaccaccacctcctcctcaacctcctcctccggctccccgaaacggagaaagagaggcgaggccgcggccgcgtccatgtccatgcccctggtgcccccgccttcccagctgaactggccggtgcaggcatggtaccccgccgccgcaccggtcgagcaggtggcgatcaccccgcgcgtggagcagctcgtcatctaa

SEQ ID NO: 160 - protein, 318 aa, Oryza sativa (japonica cultivar-group)
  G3848
MTARSMLRNHPEASVLDTIRQHLLEEPRGGGGGEAAEASFGSLVADMWSDSLPFRDDDADDMVVFGAMRDAFSCGWLPDGVFAEVKPEPLLSPDSSSYDGSSCCFGFADVSEPVTPSDAASGAAEAAAAAAAATAEHGKEEEAAAAVARGKHYRGVRQRPWGKFAAEIRDPAKNGARVWLGTFDTAEDAALAYDRAAYRMRGSRALLNFPLRIGSEIAAAAAAAAAAAAGDKRPSPEPATSESSFSSSSSCTTTTTSSSTSSSGSPKRRKRGEAAAASMSMPLVPPPSQLNWPVQAWYPAAAPVEQVAITPRVEQLVI

SEQ ID NO: 161 - DNA, 839 bp, Zea mays
  G3661
caggatgctgctgaacccggcgtcagaggcgtcggtgctagacaccatccggcagcacctcctcgaggagccagccgacgagagcttcgggagcctggtggcggaccagtggagcggctcgctcccgttccgcaccgacgacgccgacgacatggtggtgttcggggcgctgcaggacgccttcgcctacggctggctgcccgacggctcattcgtgcacgtgaagcccgagccggtgcggtcccccgactcgtcctcctacccctgctcctacgacggctcaccctgcttcggcctcctggacccggagccgccgctgacgcccggcaccaccacgcccagtagtagggggcaggaggaggccgcggcggccatggcccggggcaagcactacaggggggtgaggcagcgcccgtggggcaagttcgcggcggagatcagggaccccgccaggaacggcgcgcgcgtctggctcggcacgtacgacaccgccgaggacgccgcgctcgcctacgaccgcgccgcctaccgcatgcgcggctcgcgcgcgctcctcaacttcccgctccgcatcggctccggggacaagcgcccgtcgccggcgccgcccgagcccgccacctcctcggactcctcctcgtcttcggccagcggctcgcacaagaggcggaagcgaggcgaggccgcggctgccaacatggccatggcgctggtgcccccgccctcccagcttaaccggccggcccagccgtggttccctgccgcgccggtcgagcaggcggcgatggctccgcgcgtggagcagatcgtcgtctagtctagccatgcgccggagaaat

SEQ ID NO: 162 - protein, 270 aa, Zea mays
  G3661
MLLNPASEASVLDTIRQHLLEEPADESFGSLVADQWSGSLPFRTDDADDMVVFGALQDAFAYGWLPDGSFVHVKPEPVRSPDSSSYPCSYDGSPCFGLLDPEPPLTPGTTTPSSRGQEEAAAAMARGKHYRGVRQRPWGKFAAEIRDPARNGARVWLGTYDTAEDAALAYDRAAYRMRGSRALLNFPLRIGSGDKRPSPAPPEPATSSDSSSSSASGSHKRRKRGEAAAANMAMALVPPPSQLNRPAQPWFPAAPVEQAAMAPRVEQIVV

SEQ ID NO: 163 - DNA, 1225 bp, Triticum aestivum
  G3864
cccacgcgtccgccaagagcgaactgagatcatcctaggaccaggcgcgaccacacaggacaagatgctgctgcttaatccggcgtccgaggcggcggcggcggcgctggacagcatccggcagcagctcctggaggagccaatggcgccggcgcggccggcgtactgccggagcgcgagcttcggcagcctggtggcggaccagtggagcgagtctctcccgttccggcccaacgacgccgacgacatggtcgtctacggtgccctccgcgacgccttctcctgcggctggctccccgacggctccttcgcggccgtcaagcccgagcccctgccctcccccgactcctacgacggctgctgcctcggcagcttcctcgcgtcgccgcccgggctggacgcgccgtgggcggaggaggccgaggtcgcagcgacggcgtcaagggggaagcacttcagaggcgtgaggcagcggccgtggggcaagttcgcggcggagatccgggacccagccaagaacggcgcgcgcgtgtggctcggcaccttcgacagcgccgaggacgccgctgtggcgtacgaccgcgccgcctaccgcatgcgcggctcccgcgcgctcctcaacttcccgctccgcatcggctcggagatcgccgcagccgcgggtcagaagcgtccgtctccccagccagcgagccccgactctcctcctccctcctccagcgcacccgggtcgtcgaagcggagaaagagaggcgaggccgcagcagagtccatgtccatggctctggtgccgcccccgccggtgcaggctccggtccagctgaccctcccagtccagccgtggctcgccaccggcgccgtccagcagctagtgagctgaagcggcgaaagcaacaagtgatcgttctcatgaccgatggccattagttcttccttcatggcttcatgtgttgagcccatggaggaacagagcatcaagatggcgtcaatggcgtaatgcgtcgctcgaagaaaccttgatcagttggaggcaattacgcgccacgccattgtgaaatttgtgtggctccgtgtgaaacttgtcgctagggttagtggcgttggcacagtagcaagtgggtgcagtggaatcccgaagctggtttgtaagaggtggtgagggtgcaggtgcaaaagttgcacagaccttctcctctccaatggagaatcttctttgttaaaaaaa

SEQ ID NO: 164 - protein, 271 aa, Triticum aestivum
  G3864
MLLLNPASEAAAAALDSIRQQLLEEPMAPARPAYCRSASFGSLVADQWSESLPFRPNDADDMVVYGALRDAFSCGWLPDGSFAAVKPEPLPSPDSYDGCCLGSFLASPPGLDAPWAEEAEVAATASRGKHFRGVRQRPWGKFAAEIRDPAKNGARVWLGTFDSAEDAAVAYDRAAYRMRGSRALLNFPLRIGSEIAAAAGQKRPSPQPASPDSPPPSSSAPGSSKRRKRGEAAAESMSMALVPPPPVQAPVQLTLPVQPWLATGAVQQLVS

SEQ ID NO: 165 - DNA, 885 bp, Zea mays
  G3856
atgctgcttaacccggcgtgcgaggcggcagcgccgatggacagcatccggcatcacctcctggacgagccggcggcggcggcgaccgcgagcgcggctccgcggccggtgtactgccgcagcacgagcttcggcagcctagtggcggaccaatggagcgagtcgctcccgttccgccccgacgacgccgacgacatggtcgtcttcggcgcgctccgcgacgccttttcccagggctggctccccgacggctccttcgccgccgtgaagcccgagcccctggcgttcccggactccccctacgagcgcggatcctatccctgccttggtggcttccttctcgcggaggggcctgagacgccgaccgaggcggcgacgacgcccgggagcgaggaggaggccgcggcggcggtgtccagggggaagcactaccgcggggtgaggcagcggccgtggggcaagttcgcggcggagatccgggacccggccaagaacggcgcgcgcgtgtggctgggcacgtacgacagcgccgaggacgccgccgtggcctacgaccgcgccgcgtaccgcatgcgcggctcccgcgcgctcctcaacttcccgctccgcatcggctccgagatcgccgcggcggccgccgccgtcgcggccactgcccctgccgcgggagacaagcgggcgtccccagagccgaccgcgagctccgactcctccccttcggcctcctctgcgacaccgaagcggaggaagagaggcgaggccgctgccgcgaccatggccatggcccttgtgccgcccccgccggcggcgcaggcgcccgtccagctgaccctcccggcccgtccgtggttcgccgccggccccgtccagcagctagtgagctaa

SEQ ID NO: 166 - protein, 294 aa, Zea mays
  G3856
MLLNPACEAAAPMDSIRHHLLDEPAAAATASAAPRPVYCRSTSFGSLVADQWSESLPFRPDDADDMVVFGALRDAFSQGWLPDGSFAAVKPEPLAFPDSPYERGSYPCLGGFLLAEGPETPTEAATTPGSEEEAAAAVSRGKHYRGVRQRPWGKFAAEIRDPAKNGARVWLGTYDSAEDAAVAYDRAAYRMRGSRALLNFPLRIGSEIAAAAAAVAATAPAAGDKRASPEPTASSDSSPSASSATPKRRKRGEAAAATMAMALVPPPPAAQAPVQLTLPARPWFAAGPVQQLVS

SEQ ID NO: 167 - DNA, 959 bp, Oryza sativa (japonica cultivar-group)
  G3430
ccaaattcacgggataattcaaagatgctgcttaatccggcgtcgagagaggtggccgcgctggacagcatccggcaccacctcctggaggaggaggaggagacgccggcgacggcgccggcgccgacgcggcggccggtgtactgccggagctcaagcttcggcagcctcgtggccgaccagtggagcgagtcgctgccgttccggcccaacgacgccgaggacatggtcgtgtacggcgccctccgcgacgccttctcctccggctggctccccgacggctcattcgccgccgtcaagccggagtcgcaggactcctacgacgggtcctccatcggcagcttcctcgcgtcgtcgtcgtccgaggcggggacgcccggggaggtgacgtcgacggaggcgacggtgacgccggggatcagggagggcgagggcgaggccgtggcggtggcgtcgagggggaagcactaccgcggggtgaggcagcggccgtggggcaagttcgcggcggagatcagggacccggccaagaacggcgcgcgcgtgtggctcggcacgttcgactccgccgaggaggccgccgtggcgtacgaccgcgccgcctaccgcatgcgcggctcccgcgcgctcctcaacttcccgctccgcatcggctccgagatcgccgccgcggccgccgccgccgccgcgggcaacaagcggccatatcccgacccggcgagctccggctcttcttccccttcatcctcttcctcctcgtcgtcgtcttcctcctccgggtcaccgaagcggaggaagagaggcgaggccgcggccgcgtccatggccatggcactggttccaccaccgccaccaccggcgcaggcaccggtgcagctcgccctcccggcccagccatggttcgccgccggtccgatccagcagctggtgagctaagtggcgatgtggtagtggtagtg

SEQ ID NO: 168 - protein, 303 aa, Oryza sativa (japonica cultivar-group)
  G3430
MLLNPASREVAALDSIRHHLLEEEEETPATAPAPTRRPVYCRSSSFGSLVADQWSESLPFRPNDAEDMVVYGALRDAFSSGWLPDGSFAAVKPESQDSYDGSSIGSFLASSSSEAGTPGEVTSTEATVTPGIREGEGEAVAVASRGKHYRGVRQRPWGKFAAEIRDPAKNGARVWLGTFDSAEEAAVAYDRAAYRMRGSRALLNFPLRIGSEIAAAAAAAAAGNKRPYPDPASSGSSSPSSSSSSSSSSSSGSPKRRKRGEAAAASMAMALVPPPPPPAQAPVQLALPAQPWFAAGPIQQLVS

SEQ ID NO: 169 - DNA, 705 bp, Lycopersicon esculentum
  G3841
atggatcaacagttaccaccgacgaacttcccggtagattttccggtgtatcgccggaattcaagcttcagtcgtctaattccctgtttaactgaaaaatggggagatttaccactaaaagtcgacgattccgaagatatggtaatttacggtctattaaaagacgctctaagcgtcggatggtcgccgtttaatttcaccgccggcgaagtaaaatcggagccgagagaagaaattgaatcgtcgcctgaattttcaccttctccggcggagaccacggcagctccggcggctgaaacaccgaaaggaagacattatagaggcgttagacagcgtccgtgggggaaatttgcggcggagattagagatccggcgaagaacggagctagggtttggcttggaacgtacgaaacagctgaagaagctgcaattgcttatgataaagctgcttatagaatgagaggatcaaaagcacatttgaatttcccgcaccggatcggtttgaatgaaccggaaccggttcgagttacggcgaaaaggcgagcatcgccggaaccggcaagctcgtcgggaaacggttccatgaaacggagaagaaaagccgttcagaaatgtgatggagaaatggcgagtagatcaagtgtcatgcaagttggatgtcaaattgaacaattgacaggtgtccatcaactattggtcatttaa

SEQ ID NO: 170 - protein, 234 aa, Lycopersicon esculentum
  G3841
MDQQLPPTNFPVDFPVYRRNSSFSRLIPCLTEKWGDLPLKVDDSEDMVIYGLLKDALSVGWSPFNFTAGEVKSEPREEIESSPEFSPSPAETTAAPAAETPKGRHYRGVRQRPWGKFAAEIRDPAKNGARVWLGTYETAEEAAIAYDKAAYRMRGSKAHLNFPHRIGLNEPEPVRVTAKRRASPEPASSSGNGSMKRRRKAVQKCDGEMASRSSVMQVGCQIEQLTGVHQLLVI

SEQ ID NO: 171 - DNA, 913 bp, Arabidopsis thaliana
  G22
agaaaacatctctcactctctaaaatacacactctcatcaaaaaccttctcttcggttcagaagcattcaagaatccattatgagctcatctgattccgttaataacggcgttaactcacggatgtacttccgtaacccgagtttcagcaacgttatcttaaacgataactggagcgacttgccgttaagtgtcgacgattctcaagacatggctatttacaacactctccgtgatgccgttagctccggctggacaccctccgttcctcccgttacctctccggcggaggaaaataagcctccggcgacgaaggcgagtggctcacacgcgccgaggcagaaggggatgcagtacagaggagtgaggaggaggccgtgggggaaattcgcggcggagattagggatccgaagaagaacggagctagggtttggctcgggacttacgagacgccggaggacgcggcggtggcgtacgaccgagcggcgtttcagctcagaggatcgaaagctaagctgaattttccgcatttgattggttcttgtaagtatgagccggttaggattaggcctcgccgtcgctcgccggaaccgtcagtctccgatcagttaacgtcggagcagaagagggaaagccacgtggatgacggcgagtctagtttggttgtaccggagttggatttcacggtggatcagttttacttcgatggtagtttattaatggaccaatcagaatgttcttattctgataatcggatataattagttttaagattaagcaaaatttgtccaacgagttttgctgtatgaaatatctatcgatgactcaacaggttttgatcatgatcatatgtaatgtgatggaaattaaatattgacgtttgtttttttgttgtaaaaaaaaaaaaaaaaaa

SEQ ID NO: 172 - protein, 226 aa, Arabidopsis thaliana
  G22
MSSSDSVNNGVNSRMYFRNPSFSNVILNDNWSDLPLSVDDSQDMAIYNTLRDAVSSGWTPSVPPVTSPAEENKPPATKASGSHAPRQKGMQYRGVRRRPWGKFAAEIRDPKKNGARVWLGTYETPEDAAVAYDRAAFQLRGSKAKLNFPHLIGSCKYEPVRIRPRRRSPEPSVSDQLTSEQKRESHVDDGESSLVVPELDFTVDQFYFDGSLLMDQSECSYSDNRI

SEQ ID NO: 173 - DNA, 785 bp, Arabidopsis thaliana
  G47
cttcttcttcacatcgatcatcatacaacaacaaaaaatggattacagagaatccaccggtgaaagtcagtcaaagtacaaaggaatccgtcgtcggaaatggggcaaatgggtatcagagattagagttccgggaactcgtgaccgtctctggttaggttcattctcaacagcagaaggtgccgccgtagcacacgacgttgctttcttctgtttacaccaacctgattctttagaatctctcaatttccctcatttgcttaatccttcactcgtttccagaacttctccgagatctatccagcaagctgcttctaacgccggcatggccattgacgccggaatcgtccacagtaccagcgtgaactctggatgcggagatacgacgacgtattacgagaatggagctgatcaagtggagccgttgaatatttcagtgtatgattatctgggcggccacgatcacgtttgatttatctcgacggtcatgatcacgtttgatcttcttttgagtaagattttgtaccataatcaaaacaggtgtggtgctaaaatcttactcaaaacaagattaggtaccacagagaaacaatcaaatggttgtgaatatacattataaggttttgattaatgtttgtttcactgatttagtgaagtttggtccattgtatacaaatctattcaagaaacctagcgcgagatcatgtttcgtgattgaagattgagatttttaagtattcgtaatatttttgtaaaatacaaataaaaaaaaaaaaaaaaaaaaa

SEQ ID NO: 174 - protein, 144 aa, Arabidopsis thaliana
  G47
MDYRESTGESQSKYKGIRRRKWGKWVSEIRVPGTRDRLWLGSFSTAEGAAVAHDVAFFCLHQPDSLESLNFPHLLNPSLVSRTSPRSIQQAASNAGMAIDAGIVHSTSVNSGCGDTTTYYENGADQVEPLNISVYDYLGGHDHV

SEQ ID NO: 175 - DNA, 485 bp, Arabidopsis thaliana
  G2133
atctcatcttcatccacccaaaaacatggattcaagagacaccggagaaactgaccagagcaagtacaaaggtatccgtcgtcggaaatggggaaaatgggtatcagagattcgtgtcccgggaactcgtcaacgtctctggttaggctctttctccaccgcagaaggcgctgccgtagcccacgacgtcgctttttactgcttgcaccgaccatcttccctcgacgacgaatcttttaacttccctcacttacttacaacctccctcgcctccaatatatctcctaagtccatccaaaaagctgcttccgacgccggcatggccgtggacgccggattccatggtgctgtgtctgggagtggtggttgtgaagagagatcttccatggcgaatatggaggaggaggacaaacttagtatctccgtgtatgattatcttgaagacgatctcgtttgatctatacgagtacgtttttagcagttaa

SEQ ID NO: 176 - protein, 143 aa, Arabidopsis thaliana
  G2133
MDSRDTGETDQSKYKGIRRRKWGKWVSEIRVPGTRQRLWLGSFSTAEGAAVAHDVAFYCLHRPSSLDDESFNFPHLLTTSLASNISPKSIQKAASDAGMAVDAGFHGAVSGSGGCEERSSMANMEEEDKLSISVYDYLEDDLV

SEQ ID NO: 177 - DNA, 1082 bp, Glycine max
  G3643
ccacgcgtccgcttcttctctcagaatacacaacacaaagtcaatataattatagtatatccctatgagtaggagttcggcgatgcatggaattacaagcacaaacaacaagttgaagggagttcggcgtcgaaaatggggcaaatgggtgtcggagattcgtgttccgggcacgcaagagcgtttgtggttgggaacctacgccacgccggaggctgccgcggtggctcacgacgttgccgtctactgtctaagtaggccttcttcgttggacaaacttaacttccccgaaaccttgtcttcgtacagtgttcagctcagggacatgtctccgaggtctgtgcagaaggtggcttccgatgttggcatggatgttgatgcaagaaacattgttgcgggcaaaacttcaacggtgggggcagaaactaattgcgagagtgatgagaggactagtactgcgtctgtgtgtaatgttgttggagaaggtggtgctgatcattcggatgtgttttggtgggatgatgatggtgggtcttggcatggaagtggtggagattctacggaaagggatgccttgagcatttccattgaagattatctttagctgttctaggtttcaactttagttatctttttttttttttttttgagttatgatcgatgcgcatagttagtagttacagataattactgctagtgttgggtgtttaaacggtcagagatgatgatatataaatttgatgtgcgctagctgcctttttgaagaaactaaaaaaaggtaaaacaagaaagattgtacccccaaaatgaacttggtcaatttcacactttcacgccatttgcattttgtgcacgttgttagttttcaaattgttaattcccttgctaaacccactcaaacttgagtgcgttcaccttttattaccacgtagtaactgagagttaacgaaaatatttctttataaaaattatttaccatttagtgtctttcgtttacttgtaattattcaacttgtcaataagatgaaagttctaattttagatataataaaattcagctagtatttgtgaattactcactt

SEQ ID NO: 178 - protein, 179 aa, Glycine max
  G3643
MSRSSAMHGITSTNNKLKGVRRRKWGKWVSEIRVPGTQERLWLGTYATPEAAAVAHDVAVYCLSRPSSLDKLNFPETLSSYSVQLRDMSPRSVQKVASDVGMDVDARNIVAGKTSTVGAETNCESDERTSTASVCNVVGEGGADHSDVFWWDDDGGSWHGSGGDSTERDALSISIEDYL

SEQ ID NO: 179 - DNA, 813 bp, Zea mays
  G3650
ccacccgtgctcgatcgatcatgccatgtcaacgcccccggccgcgctgaccttgatccttctcgtctcaccgcaccttataaatacgcccacgtcgctcgtgtcgtcgtgtgctccatcgcaaacggccaaaaaccaccagcacaagtgcacaagccattgcccatcggacgcccagccggccagcccctgtcccgacggtcggccgacgacgatgagccgcgcagcgaccaacagcggcgcggagcggcggtgccggtacaggggcgtgcggcggcgggcctgggggaagtgggtgtcggagatccgggtgccgggcacgcgggagcggctgtggctgggatcctacgcggcgcccgaggccgccgccgtcgcgcacgacgccgccgcgtgcctcctccgcggctgcgcgggccgccgcctcaacttcccgggccgcgccgcctgctactacgcctgcggcgggcagcagccgctgtcgccgcgctccgtgcagcgcgtcgcgtccgacgccggcatggccgccgacgcgcagatcgtcgacgcgcgggcggccctcgcctcgccgccgcccgttgtccagcccgccgctctcgctggcattattggcggcgccgcgcgagaaggcggcggaggcgtgcgaggccccgcgtgcgcgccggcgccgccaagcaacggcgctggcagcagcagtacgtattggtccacgccgagcagtgagccgccgcttgtttacggggacattagcgtagacgacatagagatcttgatttgactattaggcactagttagtagcatagtcatggcagttc

SEQ ID NO: 180 - protein, 249 aa, Zea mays
  G3650
MSTPPAALTLILLVSPHLINTPTSLVSSCAPSQTAKNHQHKCTSHCPSDAQPASPCPDGRPTTMSRAATNSGAERRCRYRGVRRRAWGKWVSEIRVPGTRERLWLGSYAAPEAAAVAHDAAACLLRGCAGRRLNFPGRAACYYACGGQQPLSPRSVQRVASDAGMAADAQIVDARAALASPPPVVQPAALAGIIGGAAREGGGGVRGPACAPAPPSNGAGSSSTYWSTPSSEPPLVYGDISVDDIEILI

SEQ ID NO: 181 - DNA, 687 bp, Oryza sativa (japonica cultivar-group)
  G3644
atgccttttgtacgtacacttgctttcccaacgctcgcgaatcaaatcgagggtgaaattaagtcaagaacggagagagatcacggtgaggttgatctcagctcgccggaggaggcaatgagccgggcggagtgcggcggcggcgaggaggaggagcggtgcaggtacaggggcgtgcggcggcggcggtgggggaagtgggtgtcggagatccgggtgcccggcacgcgggagcggctgtggctggggtcctacgccacgccggaggccgccgccgtcgcgcacgacacggccgtctacttcctccgcggaggcgcgggcgacggcggtggcggcggcgcgacgctcaacttcccggagcgcgcggcggccacgtacggcggcggcgccgccgtggcgcgcctgtcgccgcggtccgtgcagcgcgtggcgtccgacgccggcatggccgccgacgcgcagctcgtggcggcgcgggacgccgcgcccgcgcccgcgccggcgacggcgtacgcgcgcccggatcactgcgccggcgcgacgacggcgcggcacgacgagctggcgcgccgcgggatgtacggcgctcacgcgcatgccgccggcgcgaacgccaggacgagcggcgagcggcagctcgtctgtgccgaggagattagcgtggatgacatggagatcctgatgtaa

SEQ ID NO: 182 - protein, 228 aa, Oryza sativa (japonica cultivar-group)
  G3644
MPFVRTLAFPTLANQIEGEIKSRTERDHGEVDLSSPEEAMSRAECGGGEEEERCRYRGVRRRRWGKWVSEIRVPGTRERLWLGSYATPEAAAVAHDTAVYFLRGGAGDGGGGGATLNFPERAAATYGGGAAVARLSPRSVQRVASDAGMAADAQLVAARDAAPAPAPATAYARPDHCAGATTARHDELARRGMYGAHAHAAGANARTSGERQLVCAEEISVDDMEILM

SEQ ID NO: 183 - DNA, 594 bp, Oryza sativa (japonica cultivar-group)
  G3649
atgggccgggtggcggcgagcggcggcggcggcggcggaggggagatgatgaggtacaggggcgtgcggcggcggcggtgggggaagtgggtgtcggagatccgggtgcccgggacgcgggagcgcctgtggctcggctcctacgccaccgccgaggccgccgccgtcgcgcacgacgccgccgtctgcctcctccggctcggcggcggccgccgcgccgccgcaggcggaggcggcgggctcaacttccccgcccgcgcgctcgccgcggcggcggccgcctcctcctacggcggcgccggcggtctcctgtccccgcgctccgtgcagcgcgtggcgtccgacgccggcatggccgccgacgcgcagctcgtggacctgcgccgcgaccacccgcccgccgccgccgccgcctcatcctccggcagcggcgtggcgggagacggtgcaagaaagcaagggacacgtggcgaggttagcgacacgtattggtgtaggaatggagaggatgggagcagaagccggagctccgggagtgaggagctcattgtttacgagggcttaagtgtagatgacatggaaattttgatgtaa

SEQ ID NO: 184 - protein, 197 aa, Oryza sativa (japonica cultivar-group)
  G3649
MGRVAASGGGGGGGEMMRYRGVRRRRWGKWVSEIRVPGTRERLWLGSYATAEAAAVAHDAAVCLLRLGGGRRAAAGGGGGLNFPARALAAAAAASSYGGAGGLLSPRSVQRVASDAGMAADAQLVDLRRDHPPAAAAASSSGSGVAGDGARKQGTRGEVSDTYWCRNGEDGSRSRSSGSEELIVYEGLSVDDMEILM

SEQ ID NO: 185 - DNA, 585 bp, Arabidopsis thaliana
  G1274
atgaatatctctcaaaaccctagccctaattttacgtacttctccgatgaaaactttattaatccgtttatggataacaacgatttctcaaatttgatgttctttgacatagatgaaggaggtaacaatggattaatcgaggaagagatctcatctccgacaagcatcgtttcgtcggagacatttaccggggaaagcggcggatccggcagcgcaacaacgttgagtaaaaaggaatcaactaatagaggaagtaaagagagtgatcagacgaaggagacgggtcatcgagttgcatttagaacgagatcgaagattgatgtgatggatgatggttttaaatggaggaagtatggcaagaaatctgtcaaaaacaacattaacaagaggaattactacaaatgctcaagtgaaggttgctcggtgaagaagagggtagagagagatggtgacgatgcagcttatgtaattacaacatatgaaggagtccataaccatgagagtctctctaatgtctattacaatgaaatggttttatcttatgatcatgataactggaaccaacactctcttcttcgatcttaa

SEQ ID NO: 186 - protein, 194 aa, Arabidopsis thaliana
  G1274
MNISQNPSPNFTYFSDENFINPFMDNNDFSNLMFFDIDEGGNNGLIEEEISSPTSIVSSETFTGESGGSGSATTLSKKESTNRGSKESDQTKETGHRVAFRTRSKIDVMDDGFKWRKYGKKSVKNNINKRNYYKCSSEGCSVKKRVERDGDDAAYVITTYEGVHNHESLSNVYYNEMVLSYDHDNWNQHSLLRS

SEQ ID NO: 187 - DNA, 662 bp, Glycine max
  G3724
cgcaccatagtctttgttttcatttactaccatatttagttatcagcaatggacttctactttggaaactctcctccttatcccaataattatgctcataattctcttaatatggctctatcttcccctgagattgcactatccgattatctcatgctcgatgactatgttgatcatcaagattctcgatcatcacaaagcaccgagtcatctgaaaaagcaaccttcaatgatgccactcacggattcagtactggtgcaacctctaagaataataacataaactgcaaaaatgggattaatgaaaacaaaggtggagtgggtccaaggatcgcgtttagaaccaaatcagagcttgagatcatggatgatggatacaagtggaggaagtacggcaagaagtccgtgaagagcagtcccaatctaaggaactactacaaatgttcaagtggaggatgcagtgtgaagaaaagggtggaaagggatagagatgactacagctacgtgataacaacatatgaaggtgtgcacaatcatgagagcccatttaccacatactacagccccatctccttcgtacattctgatactactttcaaatgacaccaacttcaaacccttttgggcatttacacctccctagcttaattatgtgccaagaa

SEQ ID NO: 188 - protein, 184 aa, Glycine max
  G3724
MDFYFGNSPPYPNNYAHNSLNMALSSPEIALSDYLMLDDYVDHQDSRSSQSTESSEKATFNDATHGFSTGATSKNNNINCKNGINENKGGVGPRIAFRTKSELEIMDDGYKWRKYGKKSVKSSPNLRNYYKCSSGGCSVKKRVERDRDDYSYVITTYEGVHNHESPFTTYYSPISFVHSDTTFK

SEQ ID NO: 189 - DNA, 1663 bp, Zea mays
  G3728
cattgggaccctcgaggccggccgggtctaattatatgataggtgtcaagtggaagtgcagtgatgtatgcagctgaggcatcctaacagaccccggccgacgggaaacaagaaagaaaaaatcgagaggacgccagggccgattctctgcgtgacttggggcgtcgtcgccgagttttctccggccgagggcggcgcgaccggacaaccagcgtgagcgcgaccggcgacatgactcgcggcaaccagcgtgaccgcgaccgtgagcgcgcggcggcgcggaagcccaacgccaagaactcccaggacgggctcaccccggagcagcgccgcgagagggacaagaaagctctggaggagaaggcggccaagaaggcgcagcaggcagcggccggcggcaccgggacctccacggacaacaacaagaacaaggcaggtggcaagaagtaggaggcagtggcgcgccgccacctctgtacgattaatcgatgccttgagcttgtaacttgttcgcatccttgtaggtgcgatgcttgttgggtcataaactctgatgatatcgagatttggtgatcagaaataatgcgtggttttcgcgcccaaaattgggaaccccgaggccggccggggttattcaggcaggcgcattgactgatacacatatatacaacaagcaaggcggctagctacagcggctagtgcgcgcgtggtgcaggcgcatctagctactacctggtgcttgttgtgcatacaatggcgacttcgctgggactgaaccctgaagatctcttcacttcgtactcgtcttcctactactcctcgccgccgttcatgtccgactacgcggcgagcttcacgccggcggccggggactccacggccttctcctcggagctcgacgaccttcaccacttcgactactcaccggcgccgatcgtcactgctgccggagccggggctgggggcggcgatcgcaacgagaagatgatgtggtgtgagggtggtggtgacgagagaagactcagaagcaacggaaggatcgggttcagaacgaggtcagaggtggagatcttggacgacggattcaagtggaggaagtacgggaagaaggccgtcaagaacagcccaaatccaaggaactactaccgctgctcgtcggagggctgcggcgtgaagaagcgggtggagagggaccgcgacgacccccgctacgtcatcaccacctacgacggcgtccacaaccacgccagccccggagccgctgctatcatcgtcccgtacggcagcggcggcggcaatagcggcttctacagcccgccgcacagcggctccccgtcggccacctcctactcgggctccctagccttctgacttttccgggccttgacccatagttacctttacactccagtcgtcggataagaagaatgttcagcggctggctaaacagtctcaactgctgcagctattcaaattagtgttggagatgcaatttatagagataaaatactctagaagctatcgctgtagccggattaaattctgacctacttgtatagttttacacttacacagtgcaagtaataatatttaagggaagcagagagcactctaggcggccgctcaaaaaaaaaaaaaaaaaaaaaaaaaaaaaaaaaaaaag

SEQ ID NO: 190 - protein, 205 aa, Zea mays
  G3728
MATSLGLNPEDLFTSYSSSYYSSPPFMSDYAASFTPAAGDSTAFSSELDDLHHFDYSPAPIVTAAGAGAGGGDRNEKMMWCEGGGDERRLRSNGRIGFRTRSEVEILDDGFKWRKYGKKAVKNSPNPRNYYRCSSEGCGVKKRVERDRDDPRYVITTYDGVHNHASPGAAAIIVPYGSGGGNSGFYSPPHSGSPSATSYSGSLAF

SEQ ID NO: 191 - DNA, 823 bp, Zea mays
  misc_feature (9)..(9): n is a, c, g, or t
  misc_feature (802)..(802): n is a, c, g, or t
  G3804
ccggccggngatattcaggcaggcgcattgactggtacgcatacaactacaagcaaggcggctagctacagcggctagtgcgcgcgtggtgcaggcgcagctagctagtgcgtgcaatggcgacttcgctgggactgaaccctgaagatctcttcacttcgtactcgtcttcctactactcctcgccgccgttcatgtccgactacgcggcgagcttcacgccggcgggcggggactccacggccttctcctcggagctcgacaaccttcaccacttcgactactcaccggcgccgatcgtcactgctgccggagccggggctgggggcggcgatcgcaacgagaagatgatgtggtgtcagggtggtggtgacgagagaagactcagaagcaacggaaggatcgggttcagaacgaggtcacaggtggagatcttggacgacggattcaagtggaggaagtacgggaagaaggccgtcaagaacagcccaaatccaaggaactactaccgctgctcgtcggagggctgcggcgtgaagaagcgggtggagagggaccgcgacgacccccgctacgtcatcaccacctacgacggcgtccacaaccacgccagccccgcagccgctgctatcatcgtcccgtacggcaacggcggcggcaatagcggcttctacagcccgccgcacagcggctccccgtcggccacctcctactcgggctccctagtcttctgacttttccgggccttgacccatagttacctttacaccccagtcgtcggatgagaagaatcttcagcggncggctaaacagtctcaactgc

SEQ ID NO: 192 - protein, 205 aa, Zea mays
  G3804
MATSLGLNPEDLFTSYSSSYYSSPPFMSDYAASFTPAGGDSTAFSSELDNLHHFDYSPAPIVTAAGAGAGGGDRNEKMMWCQGGGDERRLRSNGRIGFRTRSQVEILDDGFKWRKYGKKAVKNSPNPRNYYRCSSEGCGVKKRVERDRDDPRYVITTYDGVHNHASPAAAAIIVPYGNGGGNSGFYSPPHSGSPSATSYSGSLVF

SEQ ID NO: 193 - DNA, 628 bp, Glycine max
  G3803
acatatctagctattacctcaatggattactattttggaaaccctaatcctaaaccttatgataaccgtcactctgccgtagtgaacacggaatctccttcctccgagttcatgctatctgattatctcgtgttggaagatgctgtcgataatcaagagtcttggtcacaaagcactgaaactgaatcatcggagaaaggaaactccagcgatgtcagtcatgggtttggtgatgcaaccttcagcaacaccaacatgcatataaagtgcgaaaataatgggataaagcgaaagaaggaagaagtgagtcaaatgatcacgtttagaaccagatcgcagcttgaggttatggatgatggatataaatggaggaaatacggaaagaagacagtgaagaacaatcccaacccaaggaactactacaagtgttcaggtgaaggatgcaatgtgaagaaaagggtggaaagagacagggatgactcgaactatgttttaacaacgtacgacggtgtccacaatcatgagagcccgtcgactgcctactacagccaaattcccttggtgcattctaaccatgattggccccagctgcacccttctgcaaactcatgatcctcttcaatacagt

SEQ ID NO: 194 - protein, 196 aa, Glycine max
  G3803
MDYYFGNPNPKPYDNRHSAVVNTESPSSEFMLSDYLVLEDAVDNQESWSQSTETESSEKGNSSDVSHGFGDATFSNTNMHIKCENNGIKRKKEEVSQMITFRTRSQLEVMDDGYKWRKYGKKTVKNNPNPRNYYKCSGEGCNVKKRVERDRDDSNYVLTTYDGVHNHESPSTAYYSQIPLVHSNHDWPQLHPSANS

SEQ ID NO: 195 - DNA, 663 bp, Zea mays
  G3727
caagcaaggcggctagcggtgcaagtagtgcgaagctagctaggtgctggtgcatgcaatggcggcttcgctgggtctgaaccctgaagctgtcttcacttcctacacctcctcgccgccgttcatgtcggactacgtggcggcgagcttcctgccgccggccgtcgtcgactccacggacttctctgcagagctcgatgatcttcaccaccacttggattactcatcgccggcgccgaccttggccggggctcggagcgatcgcagcgagaagcagatgatcaggtggtgtgagggtggtggtggcgagaagagactcggtaggatcgggttcagaacgagatcagaggtggagatcttggacgatggattcaaatggaggaagtatggcaagaaggctgtcaagagtagcccaaatccaaggaactactaccgctgctcgtcggagggctgcggcgtgaagaagcgggtggagagggaccgcgacgacccccgctacgtcatcaccacctacgacggcgtccacaaccacgcaagccccgcagccgccgccatcatccagtacggcggcggcggcggattctatagcccgccgcacagcggctcgccgtcggccgcctcctactcgggctccttcgtcctctgacttctccgggccttgac

SEQ ID NO: 196 - protein, 195 aa, Zea mays
  G3727
MAASLGLNPEAVFTSYTSSPPFMSDYVAASFLPPAVVDSTDFSAELDDLHHHLDYSSPAPTLAGARSDRSEKQMIRWCEGGGGEKRLGRIGFRTRSEVEILDDGFKWRKYGKKAVKSSPNPRNYYRCSSEGCGVKKRVERDRDDPRYVITTYDGVHNHASPAAAAIIQYGGGGGFYSPPHSGSPSAASYSGSFVL

SEQ ID NO: 197 - DNA, 825 bp, Oryza sativa (japonica cultivar-group)
  G3721
agtggatcccccgggctggaggaaaattcaccggtgaaaaggttcagcactgtgcaatggcggcttccgtaggactgaaccctgaagctttcttcttcagcaactcctactcctactcctcatcccctttcatggccagctacacgccggagttctcggccgccgctatcgacgccaacttattctccggcgagctcgatttcgactgctctctcccagctccggcccaggagtacccggaaaatgaaaacactatgatgaggtacgagagcgaggagaagatgagggcgagggtgaacgggaggatcgggttcaggacgaggtcggaggtggagattcttgatgatggcttcaagtggaggaagtacggcaagaaagctgtcaagaacagcccaaatccaagaaactactaccggtgctcgacggaggggtgcaacgtgaagaagcgagtggagagagaccgggaggaccaccgctacgtcatcaccacctacgacggcgtccacaaccacgcgagccccgccgccgccgccgcggcgctgcagtacgccgccgccgccggcgactactacagcccgccgctcagcagcgccggctcgccgccggccgcctatttcggcaggcggcttcgctgctcttctgagggctgatgaagtttgtctaggactagacacgcccgggagctctagctaggatagaaaactagagaaagtttaattatacctgaattttaattaatcacctcacaaaactctgatgtatcatattatatcgtgatagtgactggttgttaatttaattttggcgatcgatgtgatcttcggt

SEQ ID NO: 198 - protein, 197 aa, Oryza sativa (japonica cultivar-group)
  G3721
MAASVGLNPEAFFFSNSYSYSSSPFMASYTPEFSAAAIDANLFSGELDFDCSLPAPAQEYPENENTMMRYESEEKMRARVNGRIGFRTRSEVEILDDGFKWRKYGKKAVKNSPNPRNYYRCSTEGCNVKKRVERDREDHRYVITTYDGVHNHASPAAAAAALQYAAAAGDYYSPPLSSAGSPPAAYFGRRLRCSSEG

SEQ ID NO: 199 - DNA, 680 bp, Zea mays
  G3722
agttacttgcagctggccatgcacatggcgctatcgtcccgcagctcattcgccgccgacgtcctcctcccagccaccatgtcgtatcgtcagccgtgcagcggtgcttccagctacttgggctctcagcccgcggcccctttcccgtcggcagcgttcggcgcggtggcgcagctggacgtcttcgactgcctgtcgtcggacgaaggcgttggcgtcccggcagctgtacctggtgcgttcgcgccgccgccgccgcttatgccggccgagcgcgtcgtcccggacgctgctgcaggctacagtagtcatactaggagtgcagcggctgtggcgggtgaggggtcgaggactacgcacagaattgcgttccgagtgaggtcggacgaggacgaggtactcgacgacggctacaaatggaggaagtacggaaagaagtccgtcaagaacagccctaatccgaggaactactaccggtgctcgacggagggctgcaacgtcaagaaaagggtggagcgagacagggacgacccgagatacgttgtgaccatgtacgagggagtgcacaaccatgtgagtcctggtaccgtctattacgccacccacgacgccgcctccggccgcttcttcgtcgccgggatgcatcagccaggccattgatcaacgagcagatcagagag

SEQ ID NO: 200 - protein, 213 aa, Zea mays
  G3722
MHMALSSRSSFAADVLLPATMSYRQPCSGASSYLGSQPAAPFPSAAFGAVAQLDVFDCLSSDEGVGVPAAVPGAFAPPPPLMPAERVVPDAAAGYSSHTRSAAAVAGEGSRTTHRIAFRVRSDEDEVLDDGYKWRKYGKKSVKNSPNPRNYYRCSTEGCNVKKRVERDRDDPRYVVTMYEGVHNHVSPGTVYYATHDAASGRFFVAGMHQPGH

SEQ ID NO: 201 - DNA, 729 bp, Oryza sativa (japonica cultivar-group)
  G3726
taaatacggagctttcgcgccggcctcgtactcggccatggcggcagtcggcgcgcacgcagcggtctaccaccacccggtctcgggcctctcggcgccggcgggcgacgccgcctactcgatgtcatcgtacttctcccacgggggaagctcgacctccagctccgcgtccagcttctccgccgccctcgccgccgcaacgacgccgccgcttcccgacccgtcggggtcgcagttcgacatctccgagttcttcttcgacgacgcgcctccggccgccgtgttcaatggcgcgcccaccgccgcgctgccggatggcgccgccgcaaacgcaacaaggagcgcggcggaggcggtgccggcgccggcgccggcggccgtggagaggccgcggacggagcggatcgcgttccggacgaagtcagagatcgagattcttgacgacggctacaagtggcgcaagtacggcaagaagtccgtcaagaacagccccaacccaaggaactactaccggtgctcgacggaagggtgcaacgtgaagaagagggtggagcgggacaaggacgacccgagctacgtggtgacgacgtacgaggggacgcacaaccacgtgagccccagcacggtgtactacgccagccaggacgccgcctccggccgcttcttcgtcgccggcacgcagccgccaggttctctcaattaaccgcgcgcgtacggttaatttgatcg

SEQ ID NO: 202 - protein, 221 aa, Oryza sativa (japonica cultivar-group)
  G3726
MAAVGAHAAVYHHPVSGLSAPAGDAAYSMSSYFSHGGSSTSSSASSFSAALAAATTPPLPDPSGSQFDISEFFFDDAPPAAVFNGAPTAALPDGAAANATRSAAEAVPAPAPAAVERPRTERIAFRTKSEIEILDDGYKWRKYGKKSVKNSPNPRNYYRCSTEGCNVKKRVERDKDDPSYVVTTYEGTHNHVSPSTVYYASQDAASGRFFVAGTQPPGSLN

SEQ ID NO: 203 - DNA, 666 bp, Zea mays
  G3720
atggcggcagtcggagctcacccagtgctgtaccaccacccggcgccggcgggcgacgcctcctccatgtcctcctacttctcccacggaggcagctccaccacctccagctctgcgtccagcttcaccgccgcgctcgcgccgacgacgacggcgctcgccgagcatttcgacatctccgagttcctcttcgacgacgctgcgggcgctggggtcgccggcgcgccaggtgtgttcgccgatggcgcggcccgccccgtcgtcctgccggtgccggatgccgctggtggtggtgcaattatcggcgcagccgctgggggcgcggctgcggcgtcggaggtgccagagcggccgcggacgacgcggatcgcgttccggacgaggtcggagatcgagatcctggacgacggctacaagtggaggaagtacggcaagaagtccgtcaagaacagccccaacccaaggaactactaccggtgctcgacggaagggtgcaacgtgaagaagcgggtggagcgggacaaggacgaccccagctacgtggtgacgacgtacgaggggatgcacaaccacgtcagccccagtacggtgtactacgccagccaggacgccgcctccggccgcttcttcgtcgccggcacgcagccaccgggctccctcaactga

SEQ ID NO: 204 - protein, 221 aa, Zea mays
  G3720
MAAVGAHPVLYHHPAPAGDASSMSSYFSHGGSSTTSSSASSFTAALAPTTTALAEHFDISEFLFDDAAGAGVAGAPGVFADGAARPVVLPVPDAAGGGAIIGAAAGGAAAASEVPERPRTTRIAFRTRSEIEILDDGYKWRKYGKKSVKNSPNPRNYYRCSTEGCNVKKRVERDKDDPSYVVTTYEGMHNHVSPSTVYYASQDAASGRFFVAGTQPPGSLN

SEQ ID NO: 205 - DNA, 625 bp, Glycine max
  G3723
acatacctagctatcacctcaatggattactattttggaaaccttaatcctaacccttattaccatcactctgccgtagtgaacatggcatctccctcctccgagttcatgttatctgattatctcgtgttggaagatgctcttgttgttgatcatcatcaagagtcttggtcacaaagcactgaaactgaatcgtcggagaaagcaacctccagcgatgcaagtcatgggttcggtgatgcaacctccaacaccaacatgcatataaagtgccaaaatagtgggattaagggaaagaatgcagaagtgagtcaaaggataacgtttagaaccagatcgcaacttgaggttatggatgatggatataaatggaggaaatacgggaagaaaacagtgaagagcagtcccaacccacggaactactacaagtgttcaggtgaaggatgcgatgtgaagaaaagggtggaaagggatagggatgactccaactatgtgttaacaacgtacgacggtgtccacaatcatcagaccccgtctactgcctactacagccaaatgcccttgctgcattctaatcatgattgggccctccacccttctgcaaactcataatatcctccttaat

SEQ ID NO: 206 - protein, 196 aa, Glycine max
  G3723
MDYYFGNLNPNPYYHHSAVVNMASPSSEFMLSDYLVLEDALVVDHHQESWSQSTETESSEKATSSDASHGFGDATSNTNMHIKCQNSGIKGKNAEVSQRITFRTRSQLEVMDDGYKWRKYGKKTVKSSPNPRNYYKCSGEGCDVKKRVERDRDDSNYVLTTYDGVHNHQTPSTAYYSQMPLLHSNHDWALHPSANS

SEQ ID NO: 207 - DNA, 748 bp, Arabidopsis thaliana
  G1275
ccaagaaaagggaagatcacgcattcttataggcgtaattcgtaaatagtggtgagtatgaatgatgcagacacaaacttggggagtagtttcagcgatgatactcactctgtgttcgagtttccggagctagacttgtcagatgaatggatggatgatgatcttgtgtctgcggtttccgggatgaatcagtcttatggttatcagactagtgatgttgctggtgctttattctcaggttcttctagctgtttcagtcatcctgaatctccaagtaccaaaacttatgttgctgctacagccactgcttctgccgacaaccaaaacaagaaagaaaagaaaaaaattaaagggagagttgcgttcaagacacggtccgaggtggaagtgcttgacgacgggttcaagtggagaaagtatgggaagaagatggtgaagaacagcccacatccaagaaactactacaaatgttcagttgatggctgtcccgtgaagaaaagggttgaacgagacagagatgatccgagctttgtgataacaacttacgagggttcccacaatcactcaagcatgaactaagactcgaactaaggctcaaggcgaccatgctatattcagcacatcttattttctatggttacgaacgatacttaaaactgcttctagttctttatatccattgtaaactggttgcaggttcacaaattttgagaggtttatgacattctaaatctgtagtacttatata

SEQ ID NO: 208 - protein, 173 aa, Arabidopsis thaliana
  G1275
MNDADTNLGSSFSDDTHSVFEFPELDLSDEWMDDDLVSAVSGMNQSYGYQTSDVAGALFSGSSSCFSHPESPSTKTYVAATATASADNQNKKEKKKIKGRVAFKTRSEVEVLDDGFKWRKYGKKMVKNSPHPRNYYKCSVDGCPVKKRVERDRDDPSFVITTYEGSHNHSSMN

SEQ ID NO: 209 - DNA, 731 bp, Oryza sativa (japonica cultivar-group)
  G3730
aaacactcaatcagcagcagcagcagctagcttagctaacgcacagtgacgcgagcatggcggcttcgctgggactctgccacgagacgtcgtacgcctactcgtacccggcgtcgaacacctcctcctccttgtgcttccctcctctcatggcggaccacatcgtcgacggcggcggcggcggcggctgttcctttggtgaattcctggagctcggccattccgtgtactcgctgccgcttccgccgccgccgtcgcagccggtggtggtcgccggcgggaacaatgatcagtatggcgtgtcgtcgtcgtcgtcggcggcggcgacgacgagcaggatcgggttcaggacgaggtcggaggtggaggtgctggacgacgggttcaagtggcgaaagtacgggaagaaggcggtgaagagcagcccgaacccgcggaactactaccggtgctcggcggcggggtgcggcgtcaagaagcgggtggagcgcgacggcgacgacccgcgctacgtcgtcaccacctacgacggcgtccacaaccacgcgacccccggctgcgtcggcggcggcggccacctcccgtaccctacttccgctgcgccgccgtggagcgttccggcggcggcggcctcgccgcctcccgcgcacgcgcaggcgtggggggcgccgctgcacgccgccgcggcggcgcactcgtcggaatcgtcgttctgaacgctgaatttactt

SEQ ID NO: 210 - protein, 219 aa, Oryza sativa (japonica cultivar-group)
  G3730
MAASLGLCHETSYAYSYPASNTSSSLCFPPLMADHIVDGGGGGGCSFGEFLELGHSVYSLPLPPPPSQPVVVAGGNNDQYGVSSSSSAAATTSRIGFRTRSEVEVLDDGFKWRKYGKKAVKSSPNPRNYYRCSAAGCGVKKRVERDGDDPRYVVTTYDGVHNHATPGCVGGGGHLPYPTSAAPPWSVPAAAASPPPAHAQAWGAPLHAAAAAHSSESSF

SEQ ID NO: 211 - DNA, 689 bp, Zea mays
  G3719
ccaccatggccgatgactacttccagttcggattcgacggccaggagatggtgggcgctcccgctcccgcctgcggcggctacgactgctcggcgccggtgttcgccaacagttcttcagacgccgccgccgccgtcggcaatggcatgagcctgctgagctatggcgtcgacggcgacggcgacgggaggaggccgatgagcggaccaccatatggcaccggtgggaacggcggcggccggccgccgtcgtcgtcacggattgggttccggacgcggtcggaggtggacgtgctggacgatggcttcaagtggcgcaagtacggcaaaaagacggtcaagagcagccccaacccgaggaactactaccggtgctcggcggagggctgcggcgttaagaagcgcgtggagcgggacagcgacgacccgcgctacgtcgtcaccacctacgacggcgtccacaaccacgccgcgctgggcccgggcgccgcctcctacctgtgccaaccaccgcctccgcgcggcgcaaccgcaaccgcaaccgtaacgcccttctcgcctccacgctcggcctcggcgccggcgcccctggctgcagcgcccagctggagcgccgcctgtgacgcgtgggaggcgcagctgcacgccgcggcggcggctgctcattcctcggagtcgtcgtactgatcc

SEQ ID NO: 212 - protein, 226 aa, Zea mays
  G3719
MADDYFQFGFDGQEMVGAPAPACGGYDCSAPVFANSSSDAAAAVGNGMSLLSYGVDGDGDGRRPMSGPPYGTGGNGGGRPPSSSRIGFRTRSEVDVLDDGFKWRKYGKKTVKSSPNPRNYYRCSAEGCGVKKRVERDSDDPRYVVTTYDGVHNHAALGPGAASYLCQPPPPRGATATATVTPFSPPRSASAPAPLAAAPSWSAACDAWEAQLHAAAAAAHSSESSY

SEQ ID NO: 213 - DNA, 831 bp, Oryza sativa (japonica cultivar-group)
  G3725
gccaacccacatgcacgtgtaccgatgtacatggcggcggcggctgcgggagcaagcacacccttcaatttttgccgccacggctcgcacgccgagtacgacgccgtcttcagcggcagctggatggcgcgccgcccctccgcggcgccgcacggtggcggcgcctccggctccggctccggcagcggctacggcgccgcctcgtacgttgctcccaccttcggcgcggcgtttaggcagcagcatctcgacctcctcgactacctgtccgacgatcagggcgttccggcgccaccaccagcggctgtgcccagcgcgtcgtacgtgacgccggcgccggcgatggcccccgctgaaccggtcgtgccggatgctgttgccgccgccggcggctatccgaggagcgtggctgcggcggcggcggccgtggccggcgagggaagagatcggacgacgacggacaagatcgcattccggacgaggtcggacgatgagatactcgacgacgggtataagtggaggaagtacgggaaaaagtccgttaagaacagccctaatccgaggaactactaccggtgctcgacggaggggtgcaacgtgaagaagagggtggagagagacaagaacgacccgcggtacgtggtgacgatgtacgaggggatccacaaccacgtgtgccccggcactgtctactacgccgcgcaggacgccgcctccggccgctttttcgtcgccgggatcagtcacccagaccttaattaagctaggatatgctttgccggcccagctgtggcttagcttgatgtgcagctctagttattgtatgggctg

SEQ ID NO: 214 - protein, 243 aa, Oryza sativa (japonica cultivar-group)
  G3725
MAAAAAGASTPFNFCRHGSHAEYDAVFSGSWMARRPSAAPHGGGASGSGSGSGYGAASYVAPTFGAAFRQQHLDLLDYLSDDQGVPAPPPAAVPSASYVTPAPAMAPAEPVVPDAVAAAGGYPRSVAAAAAAVAGEGRDRTTTDKIAFRTRSDDEILDDGYKWRKYGKKSVKNSPNPRNYYRCSTEGCNVKKRVERDKNDPRYVVTMYEGIHNHVCPGTVYYAAQDAASGRFFVAGISHPDLN

SEQ ID NO: 215 - DNA, 1091 bp, Oryza sativa (japonica cultivar-group)
  G3729
aaagcgctctgcgtgagctgagctgagctaggcgtcgcgcgcgatgtcgtcgctgtacccgtctctcctctcgctgagcgagagccccgccgagtaccggcaggtcggcggtggccgctacgcgggggaggacgtcgtcgacgacgacgacgacatggctgccgtcgccgacgctgtgtccagctacctctccttcgacatggacgacgtcgagtattacacgccggaggtgggcttccactcaaagcagcacaacccgccgccagttgctgcggcgccactggaagccggaggaggcagggagcaaagccggcgggaagccgccgtcaatcttggcaagatggacaggggaccggcgccggtgagcggcggcgcggcgactggcggcgtgccgaggagcaagaacggcagcaagatcgcgttcaagacgaggtcggaggtggacgtgctggacgacggctaccggtggaggaagtacggcaagaagatggtcaagaacagccccaacccaaggaactactaccggtgctcgagcgaggggtgccgcgtgaagaagcgggtggagcgcgcccgggacgacgcgcgcttcgtcgtcaccacctacgacggcgtccacaaccacccggcgccgctgcacctcaggccgcagctgccgccgcccggcggctactcgatcgccggggcaccggccgtggtggcgccgcacggccgcctcgggctggaggaggccgaggtgatcgctctcttcaggggcaccaccgccacctcgctgctgcttccttgaccggccagtccgacgcggcggcgccggcggcgacaactgactagctagtgtgagtcctgggccgtacaggaatggacaattagtttgtctccgatcgaggaccaaggcgacctgaatcaaaattacggcccatcgatatatagtaggtcgtttaattcatcgaaattagacgaatttcatgtacaattattgcattacagtattatttgaaacagtattgtatatatttgctatacaatttgatggatcgtatgtctttagcagttgtaagtatattaatctatagatctagtagttcagccatgat

SEQ ID NO: 216 - protein, 246 aa, Oryza sativa (japonica cultivar-group)
  G3729
MSSLYPSLLSLSESPAEYRQVGGGRYAGEDVVDDDDDMAAVADAVSSYLSFDMDDVEYYTPEVGFHSKQHNPPPVAAAPLEAGGGREQSRREAAVNLGKMDRGPAPVSGGAATGGVPRSKNGSKIAFKTRSEVDVLDDGYRWRKYGKKMVKNSPNPRNYYRCSSEGCRVKKRVERARDDARFVVTTYDGVHNHPAPLHLRPQLPPPGGYSIAGAPAVVAPHGRLGLEEAEVIALFRGTTATSLLLP

SEQ ID NO: 217 - DNA, 1418 bp, Arabidopsis thaliana
  G194
tctttcttctctctctatctctcctctttgaaccctaaaaactctttctttacaaggattgatctttttgtatttttgattttgacatttgctttgtgttcgatctctgttttgatgcgatttctctgtttttaaagccatttgatagattgtttccggtaaagctcagcgagagaagaagaagaacaacaatggagtttacagatttctcaaagacgagtttttactacccgtcgtcacaaagcgtttgggatttcggagatttagcggcggcggagaggcattctttagggttcatggagttattaagttctcagcagcatcaagactttgctactgtttctcctcattccttccttctccaaacgtctcaaccgcaaacgcaaacgcaaccatcggcgaagctgtcttcaagtatcattcaagctccaccgtcagagcaattagtgacgtcaaaggtggagtctttgtgttcggatcatttgttgataaacccaccggcgactcctaactcgtcatcgatttcgtctgcttcaagcgaggctctaaatgaagagaaaccgaaaacagaagacaatgaagaagaaggaggtgaagatcaacaagagaagagtcatactaagaaacagttgaaagcaaagaagaataatcagaagagacagagagaggcaagagtcgcattcatgacaaagagtgaagttgatcatctcgaagatggttatcgctggcgaaaatatggtcaaaaagctgtcaaaaacagtccttttcccaggagttactaccgttgcacaacggcttcatgtaacgtgaagaagagagtggagagatcattcagagatccaagcactgtggttacaacctacgaaggtcaacacactcacattagtccactcacgtctcgtcctatttccactggaggtttcttcggatcgtcaggagctgcttcgagtctcggtaatggttgctttgggtttcctattgatggctccacgttaatctctcctcagttccaacagcttgtccaataccatcaccaacagcagcaacaagaactcatgtcttgttttggaggagtcaacgagtaccttaatagccacgctaatgagtatggtgatgataatcgtgtgaagaagagtcgagttttggttaaagataatggacttctgcaagatgttgttccgtctcatatgttgaaggaagagtagtagtatatatatagtcttatagttttaatctagtttttttttgtataattgtctaaaagaaacggatcttttgttctgatgaagaagatgttttcttatggttctgaaatcgtaaggtaatgatgattgtaccaagccgagaaagtacttgtgattttcaccattgaatcactataaatgtaatttttatttactgtgaaaaaaaaaaaaaaa

SEQ ID NO: 218 - protein, 337 aa, Arabidopsis thaliana
  G194
MEFTDFSKTSFYYPSSQSVWDFGDLAAAERHSLGFMELLSSQQHQDFATVSPHSFLLQTSQPQTQTQPSAKLSSSIIQAPPSEQLVTSKVESLCSDHLLINPPATPNSSSISSASSEALNEEKPKTEDNEEEGGEDQQEKSHTKKQLKAKKNNQKRQREARVAFMTKSEVDHLEDGYRWRKYGQKAVKNSPFPRSYYRCTTASCNVKKRVERSFRDPSTVVTTYEGQHTHISPLTSRPISTGGFFGSSGAASSLGNGCFGFPIDGSTLISPQFQQLVQYHHQQQQQELMSCFGGVNEYLNSHANEYGDDNRVKKSRVLVKDNGLLQDVVPSHMLKEE

SEQ ID NO: 219 - DNA, 931 bp, Arabidopsis thaliana
  G2517
tcctcactctctctctttttctctaaccataaaatctctttgatctctttctctgtgttttgataatggaaaatgttggtgttgggatgccgttttacgatttagggcaaacaagggtttacccactcttgtctgatttccacgatttatcggcggagaggtatccggtagggttcatggatttactgggtgttcatcgtcatacacccacccatacgccgttgatgcattttccgaccacacctaactcgtcctcgagcgaagctgtgaatggagatgacgaagaagaagaagatggagaagaacagcagcataagacaaagaagcggtttaaattcactaaaatgagtagaaagcagacgaagaagaaggtgccaaaagtgtcattcatcacgaggagtgaggttcttcatctagatgatggttataagtggagaaaatacggtcaaaaacctgtcaaagacagcccttttccaagaaattattaccgttgcacaacaacttggtgtgacgtgaagaagagagtagagagatcattcagtgatccaagcagtgtaatcaccacttacgaaggtcaacatactcatcctcgtccactactcatcatgcccaaagaaggcagctctccatccaatggctcagcttctagggcccacattggcctccctacactccctcctcagcttttagattacaacaaccaacaacaacaagcgccgtcttcttttggaaccgagtacattaacaggcaagaaaaaggaattaatcatgatgatgatgacgatcatgttgtgaagaagagtcgaactcgggatctgctggatggagctggtttagtcaaagatcatggccttcttcaggatgttgttccctctcatatcattaaggaagagtattagttaatcgcataattatgtagctagctagctag

SEQ ID NO: 220 - protein, 277 aa, Arabidopsis thaliana
  G2517
MENVGVGMPFYDLGQTRVYPLLSDFHDLSAERYPVGFMDLLGVHRHTPTHTPLMHFPTTPNSSSSEAVNGDDEEEEDGEEQQHKTKKRFKFTKMSRKQTKKKVPKVSFITRSEVLHLDDGYKWRKYGQKPVKDSPFPRNYYRCTTTWCDVKKRVERSFSDPSSVITTYEGQHTHPRPLLIMPKEGSSPSNGSASRAHIGLPTLPPQLLDYNNQQQQAPSSFGTEYINRQEKGINHDDDDDHVVKKSRTRDLLDGAGLVKDHGLLQDVVPSHIIKEEY

SEQ ID NO: 221 - DNA, 696 bp, Arabidopsis thaliana
  G1792
aatccatagatctcttattaaataacagtgctgaccaagctcttacaaagcaaaccaatctagaacaccaaagttaatggagagctcaaacaggagcagcaacaaccaatcacaagatgacaagcaagctcgtttccggggagttcgaagaaggccttggggaaagtttgcagcagagattcgagacccgtcgagaaacggtgcccgtctttggctcgggacatttgagaccgctgaggaggcagcaagggcttatgaccgagcagcctttaaccttaggggtcatctcgctatactcaacttccctaatgagtattatccacgtatggacgactactcgcttcgccctccttatgcttcttcttcttcgtcgtcgtcatcgggttcaacttctactaatgtgagtcgacaaaaccaaagagaagttttcgagtttgagtatttggacgataaggttcttgaagaacttcttgattcagaagaaaggaagagataatcacgattagttttgttttgatattttatgtggcactgttgtggctacctacgtgcattatgtgcatgtataggtcgcttgattagtactttataacatgcatgccacgaccataaattgtaagagaagacgtactttgcgttttcatgaaatatgaatgttagatggtttgagtacaaaaaaaaaaaaaaaaaaaaaaa

SEQ ID NO: 222 - protein, 139 aa, Arabidopsis thaliana
  G1792
MESSNRSSNNQSQDDKQARFRGVRRRPWGKFAAEIRDPSRNGARLWLGTFETAEEAARAYDRAAFNLRGHLAILNFPNEYYPRMDDYSLRPPYASSSSSSSSGSTSTNVSRQNQREVFEFEYLDDKVLEELLDSEERKR

SEQ ID NO: 223 - DNA, 450 bp, Arabidopsis thaliana
  G1795
acaaacacgcaaaaagtcattaatatatggatcaaggaggtcgaggtgtcggtgccgagcatggaaagtaccggggagttcggagacgaccttggggaaaatatgcagcagagatacgagattcgaggaagcacggtgaacgtgtgtggcttggaacgttcgatacggcagaggaagcggctagagcctatgaccaagctgcttactccatgagaggccaagcagcaatccttaacttccctcatgagtataacatggggagtggtgtctcttcttccaccgccatggctggatcttcctccgcctccgcctccgcttcttcttcttctaggcaagtttttgaatttgagtacttggatgatagtgttttggaggagctccttgaggaaggagagaaacctaacaagggcaagaagaaatgagcgagatataattcatgattatttctaa

SEQ ID NO: 224 - protein, 131 aa, Arabidopsis thaliana
  G1795
MDQGGRGVGAEHGKYRGVRRRPWGKYAAEIRDSRKHGERVWLGTFDTAEEAARAYDQAAYSMRGQAAILNFPHEYNMGSGVSSSTAMAGSSSASASASSSSRQVFEFEYLDDSVLEELLEEGEKPNKGKKK

SEQ ID NO: 225 - DNA, 553 bp, Arabidopsis thaliana
  G30
ctcttctgacgcacaacagtatatacacatacacagatatatggatcaaggaggtcgtagcagtggtagtggaggaggaggagccgagcaagggaagtaccgtggagtaaggagacgaccttggggtaaatacgccgcggaaataagagattcgaggaagcacggagagcgtgtgtggctagggacattcgacactgcggaagacgcggctcgagcctatgaccgagccgcctattcaatgagaggcaaagctgccattctcaacttccctcacgagtataacatgggaaccggatcctcatccactgcggctaattcttcttcctcgtcgcagcaagtttttgagtttgagtacttggacgatagcgttttggatgaacttcttgaatatggagagaactataacaagactcataatatcaacatgggcaagaggcaataaagggaatacaatcggtattaactgaaagttatgtgaaagaccattttcagttataacaaataaaataaaatcccaagcgtacaaagctgtttctaaaaaaaaaaaaaaaaa

SEQ ID NO: 226 - protein, 133 aa, Arabidopsis thaliana
  G30
MDQGGRSSGSGGGGAEQGKYRGVRRRPWGKYAAEIRDSRKHGERVWLGTFDTAEDAARAYDRAAYSMRGKAAILNFPHEYNMGTGSSSTAANSSSSSQQVFEFEYLDDSVLDELLEYGENYNKTHNINMGKRQ

SEQ ID NO: 227 - DNA, 375 bp, Oryza sativa (japonica cultivar-group)
  G3383
atggaggacaaccggagcaaggacacggcgaccaagtaccgcggcgtgaggaggcggccgtggggcaagttcgcggcggagatccgcgacccggagcgcggcggggcgcgcgtctggctcggcaccttcgacaccgccgaggaggcggcgcgtgcctacgaccgcgcggcctacgcccagcgcggcgccgccgccgtgctcaacttcccggccgccgccgccgccggcaggggtggaggagccggcggcgccgcttccgggtcgtcgtcgtcgtcgtccgcgcagcgcggcaggggcgacaagatcgagttcgagtacctcgacgacaaggtgctcgacgatctcctcgacgacgagaagtaccgtggtaaatga

SEQ ID NO: 228 - protein, 124 aa, Oryza sativa (japonica cultivar-group)
  G3383
MEDNRSKDTATKYRGVRRRPWGKFAAEIRDPERGGARVWLGTFDTAEEAARAYDRAAYAQRGAAAVLNFPAAAAAGRGGGAGGAASGSSSSSSAQRGRGDKIEFEYLDDKVLDDLLDDEKYRGK

SEQ ID NO: 229 - DNA, 549 bp, Arabidopsis thaliana
  G1791
atgtacatgcaaaaacaaaaaccttaaaagctttcatggaacgtatagagtcttataacacgaatgagatgaaatacagaggcgtacgaaagcgtccatggggaaaatatgcggcggagattcgcgactcagctagacacggtgctcgtgtttggcttgggacgtttaacacagcggaagacgcggctcgggcttatgatagagcagctttcggcatgagaggccaaagggccattctcaattttcctcacgagtatcaaatgatgaaggacggtccaaatggcagccacgagaatgcagtggcttcctcgtcgtcgggatatagaggaggaggtggtggtgatgatgggagggaagttattgagttcgagtatttggatgatagtttattggaggagcttttagattatggtgagagatctaaccaagacaattgtaacgacgcaaaccgctagatcatcactacttacttacagtgtaatgtttttggagtaaagagtaataatcaatataatatactttagtttaggaaaaaaaaaaaaaaaaaaa

SEQ ID NO: 230 - protein, 139 aa, Arabidopsis thaliana
  G1791
MERIESYNTNEMKYRGVRKRPWGKYAAEIRDSARHGARVWLGTFNTAEDAARAYDRAAFGMRGQRAILNFPHEYQMMKDGPNGSHENAVASSSSGYRGGGGGDDGREVIEFEYLDDSLLEELLDYGERSNQDNCNDANR

SEQ ID NO: 231 - DNA, 609 bp, Glycine max
  G3519
tttctttctttctatactttttgtggttctgattattaagttctaagagaataacaatggagggtggaagatcatctgtttcaaatgggaattgtgaggttcggtatagagggattagaagaaggccatggggcaagtttgcagcagagattcgtgaccctacgaggaaagggacaaggatatggcttggaacatttgacactgcggaacaagctgctcgagcttatgatgctgctgcttttcattttcgtggtcatagagcaattctcaacttcccaaatgagtaccaatctcataatccaaactcttctttgcctatgcctctaattgtgcctcctccttcttattcttcttctttcacttctaattattctgctgatgataataaccaccttgtgagacctggagaaataatgcaaggtggtgatcttgatgacacttttgagttggagtacttggataataagttgctcgaggaactccttcagatgcaagataacagacacttctaaaagtaaaatataacacaagccagctatgttgtgttagtcactggcatgaaataaaatgcaaagaaatattgttgattttatttaatatattttgttt

SEQ ID NO: 232 - protein, 151 aa, Glycine max
  G3519
MEGGRSSVSNGNCEVRYRGIRRRPWGKFAAEIRDPTRKGTRIWLGTFDTAEQAARAYDAAAFHFRGHRAILNFPNEYQSHNPNSSLPMPLIVPPPSYSSSFTSNYSADDNNHLVRPGEIMQGGDLDDTFELEYLDNKLLEELLQMQDNRHF

SEQ ID NO: 233 - DNA, 514 bp, Oryza sativa (japonica cultivar-group)
  G3381
atcgatcatctgctacgaactcaccctatatatatatactccatcttaggagctgcttgatcgatcgacatatatataactaatggatcatcatcatcagcagcagcagcaggagggtgagctggtggccaagtacaggggcgtgcggcggcggccgtggggcaaattcgcggcagagatccgcgactcgagccggcacggcgtccgcgtgtggctgggcaccttcgacacagccgaggaggccgctcgcgcctacgaccgctccgcctactccatgcgcggcgccaacgccgtcctcaacttccccgccgacgcccacatctacgcccgtcaactacacaataataacgccgctgctggctcttcatcttcctcttccgccgccgccgcagcagccaggccgccgccgatcgagttcgagtacctcgatgaccacgtcctgcaggagatgctccgagaccacaccaccaacaagtagcttactactccactatatatgctgcctgctgcttgt

SEQ ID NO: 234 - protein, 131 aa, Oryza sativa (japonica cultivar-group)
  G3381
MDHHHQQQQQEGELVAKYRGVRRRPWGKFAAEIRDSSRHGVRVWLGTFDTAEEAARAYDRSAYSMRGANAVLNFPADAHIYARQLHNNNAAAGSSSSSSAAAAAARPPPIEFEYLDDHVLQEMLRDHTTNK

SEQ ID NO: 235 - DNA, 882 bp, Oryza sativa (japonica cultivar-group)
  G3737
acacatgcatcgatcattcatggatgccgaattgccgcgatccgggcattatttcgcgccaggagacccaagatcatcgtgtcgcccacgctataaatagctagctagcttgcctttatgttgcatatgccaactgctacatgcaggacgtctgaaactatcattagtgacctgcagcgcctgcagtatatatatacaagtagtagtgagcatggaggacgacaagaaggaggcggcgagcaagtaccgcggcgtacggaggcggccgtggggcaaattcgcggcggagatccgcgacccggagcgcggcggctcacgcgtctggcttggcacgttcgacaccgccgaggaggccgcgcgagcgtacgaccgcgccgcattcgccatgaagggcgctatggccgtgctcaacttcccaggcaggacgagcagcaccggctcttcgtcgtcatcgtcatccacgccgccagctccggtgacgacgagccgccactgcgccgacacgacggagaaggtggagcttgtgtaccttgacgacaaggtgctcgacgagctccttgcggaggactacagctaccgcaacaacaacaactactgatccggccgtcgatgaactgagacggatcgacatggggccggtcgtcggtacgctcgctgaaacgagacccggattgctatcaataagcaagcagaagaaaaccgtctcctatatatagcttcttctgttggcacaagcatatatgggcatgcatgacacatgctactgtgaattgacgggtgtgtgctgtgtgcagactactaaaccacgcttgcaagttgcacgtacgacgtggttgtcaagagcatgcagtccacgaagcagagaaaaacacctggtttatc

SEQ ID NO: 236 - protein, 128 aa, Oryza sativa (japonica cultivar-group)
  G3737
MEDDKKEAASKYRGVRRRPWGKFAAEIRDPERGGSRVWLGTFDTAEEAARAYDRAAFAMKGAMAVLNFPGRTSSTGSSSSSSSTPPAPVTTSRHCADTTEKVELVYLDDKVLDELLAEDYSYRNNNNY

SEQ ID NO: 237 - DNA, 466 bp, Oryza sativa (japonica cultivar-group)
  G3515
gtgtgcgagcggttgcgtccgcatggaggacgacaagagtaaggaggggaaatcgtcgtcgtcgtaccgcggcgtgcggaagcggccgtggggcaagttcgcggcggagatccgcgacccggagcgcgggggagcccgcgtgtggctcggcacgttcgacaccgcggaggaggccgcgcgggcgtacgaccgcgccgcattcgccatgaagggcgccacggccatgctcaacttcccgggagatcatcatcacggcgccgcaagcaggatgaccagcaccggctcttcttcgtcctccttcaccacgcctcctccggcgaactcctccgcggcggcgggccgcggcggctccgatcggacgacggacaaggtggagctggagtgcctcgacgacaaggtcctggaggacctcctcgcggagaccaactatcgtgataagaactactagctagctagctactatggc

SEQ ID NO: 238 - protein, 141 aa, Oryza sativa (japonica cultivar-group)
  G3515
MEDDKSKEGKSSSSYRGVRKRPWGKFAAEIRDPERGGARVWLGTFDTAEEAARAYDRAAFAMKGATAMLNFPGDHHHGAASRMTSTGSSSSSFTTPPPANSSAAAGRGGSDRTTDKVELECLDDKVLEDLLAETNYRDKNY

SEQ ID NO: 239 - DNA, 393 bp, Zea mays
  G3516
atggaggacgacaagaaggagggcaagtaccgcggcgtgcggaagcggccgtggggcaagttcgccgcggagatccgggacccggagcgcggcggctcccgcgtctggctcggcaccttcgacaccgccgaggaggccgccagggcctacgaccgcgccgcattcgccatgaagggcgccacggccgtgctcaacttccccgccagcggaggatcgtcagctggcgcggctcccggcggccggaccagcggcggctcctcctcgtccaccacgtcggctccggccagcagggggagggcccgtgttcccgactcggagaaggtggagctggagtgcctcgacgacagggtcttggaagagctgctcgcggaagacaagtacaacaagaactaa

SEQ ID NO: 240 - protein, 130 aa, Zea mays
  G3516
MEDDKKEGKYRGVRKRPWGKFAAEIRDPERGGSRVWLGTFDTAEEAARAYDRAAFAMKGATAVLNFPASGGSSAGAAPGGRTSGGSSSSTTSAPASRGRARVPDSEKVELECLDDRVLEELLAEDKYNKN

SEQ ID NO: 241 - DNA, 440 bp, Glycine max
  G3520
aaggcacacaatggaagaggagtcaaaggagaaaaagaaggacactaaggaggaaccacgttatagaggagtgcggcggcggccgtgggggaagttcgcggccgagattcgggacccggcccggcacggtgcccgagtgtggctggggacatttctcacggcggaggaggctgctagggcttatgaccgagctgcctatgagatgaggggcgctttagccgttctcaattttccaaatgagtatccttcatgctcttctatgaactcatcttcaacattagcaccttcatcttcttcttcaaattcaatgcttaaaagtgatcatggtaaacaagttattgagttcgagtgcttggatgacaaattgttagaggaccttcttgattgtgatgactatgcctacgagaaagacttgcctaagaactgaacggtttgatcaa

SEQ ID NO: 242 - protein, 138 aa, Glycine max
  G3520
MEEESKEKKKDTKEEPRYRGVRRRPWGKFAAEIRDPARHGARVWLGTFLTAEEAARAYDRAAYEMRGALAVLNFPNEYPSCSSMNSSSTLAPSSSSSNSMLKSDHGKQVIEFECLDDKLLEDLLDCDDYAYEKDLPKN

SEQ ID NO: 243 - DNA, 477 bp, Zea mays
  G3517
tacgtccgatccacagccatcatcgccacccgcgcgcttatggatggcgagtggtccaaggacggcggaggcggcgagccgaccaagtaccgcggcgtgcggcgtcggccctggggcaagtacgcggcggagatccgcgactcgagccggcacggcgtccgcatctggctcggcacgttcgacaccgccgaggaggccgccagggcgtacgaccgctccgccaactccatgcgcggcgccaacgccgtgctcaacttcccggaggacgcgcccgcctacgccgccgccgcctcccgtggctccgccggcggatcctcgtccagaccggcgggctccggccgggacgtgatcgagtttgagtacctcgacgacgaggtgctgcaggagatgctcaggagccaggagccgtcggcggcggcggcgcagaagaagaagtagcgcgagcgccacaggtggcgaaacggccgcttttccaaa

SEQ ID NO: 244 - protein, 132 aa, Zea mays
  G3517
MDGEWSKDGGGGEPTKYRGVRRRPWGKYAAEIRDSSRHGVRIWLGTFDTAEEAARAYDRSANSMRGANAVLNFPEDAPAYAAAASRGSAGGSSSRPAGSGRDVIEFEYLDDEVLQEMLRSQEPSAAAAQKKK

SEQ ID NO: 245 - DNA, 717 bp, Glycine max
  G3518
ctaacacacataacaataacttagcaacattttttccttccttctttctttctttctatactttttgttgttaattctaagttctaagagaagaaaaatggagggtggaagatcatcagtttcaaatgggaatgttgaggttcgttatagagggattagaagaaggccatggggaaagtttgcagcagagattcgtgaccctacaaggaaaggaacaaggatatggcttggaacatttgacactgctgaacaagctgcacgagcttatgatgctgctgcttttcattttcgtggccacagagcaattctcaacttcccaaatgagtatcaatctcataatccaaactcttctttgcctatgcctctagctgtgtcagctcctccttcttattcttcttcttcttccacttctaattattccggtgatgataataataaccaccttgtgagaccagctttttctggagaaataatgcaaggtggtgatcatgatgatgatacttttgagttggagtacttcgataataagttgctcgaggaactccttcagatgcaagataacagacacttctaaaagtaaaatataacacaagccagctatgttgtgttagtcactggcatgaaataaaatgcaaagaaatattgttgattttatttaatatattttgtttgatttttttttttttttttgtagctgatcaaagttcttcgaaatga

SEQ ID NO: 246 - protein, 158 aa, Glycine max
  G3518
MEGGRSSVSNGNVEVRYRGIRRRPWGKFAAEIRDPTRKGTRIWLGTFDTAEQAARAYDAAAFHFRGHRAILNFPNEYQSHNPNSSLPMPLAVSAPPSYSSSSSTSNYSGDDNNNHLVRPAFSGEIMQGGDHDDDTFELEYFDNKLLEELLQMQDNRHF

SEQ ID NO: 247 - DNA, 899 bp, Zea mays
  G3739
cgatataattcactcctctcaacgctcgctgcacacacacaccagtgaacctagccagccatttgccgcatcgatcatcagtcgctgtcacgcgcgccaaaccaaaccaaagcccaaacccagctgcaagtgctactgacagcagctagcaaacacacacccgtcgccatcgctatggacggcgactggtccaaggacggcggaggtggagagccgaccaaatatcgcggcgtgcggcggcggccctggggcaagtacgcggccgagatccgcgactcgagccgccacggcgtccgcatctggctgggcaccttcgacaccgccgaggaggccgccagggcgtacgaccggagcgcctactccatgcgcggcgccaacgccgtcctcaacttcccggaggacgcgcacgcctacgccgccgcctgccgcggctccggatcctcctcatcctcgtccaggcataggcagcagcagcagcagggctccggcagggacgtgatcgagctcgagtacctcgacgacgaggtgctgcaggagatgctcaggaaccacgagccgtcgtcgtctgcgaggaagaagatgtaatgcaagacgactggtacacgtggcgaatgcacgttgcacatcagaatgccatgtatgcgtggggggttacgttcaattgtatgcatgcagtgcagtgactaccggccggctctcctggatatgtcggccatctctctctatatattattaaaatgtcagctcccttctctaatttggcgggagttacatcagtggtactatgcagagttgcatacttgcatatatatgcacattattaattaataactcgatctctcgtggacggtggaacagtgataatcatctcattgtcaattaattttgatcaaagaaat

SEQ ID NO: 248 - protein, 136 aa, Zea mays
  G3739
MDGDWSKDGGGGEPTKYRGVRRRPWGKYAAEIRDSSRHGVRIWLGTFDTAEEAARAYDRSAYSMRGANAVLNFPEDAHAYAAACRGSGSSSSSSRHRQQQQQGSGRDVIELEYLDDEVLQEMLRNHEPSSSARKKM

SEQ ID NO: 249 - DNA, 579 bp, Oryza sativa (japonica cultivar-group)
  G3380
ggtccgatccgtaacagtagtagctagttaatttgattattgtccgtccgcggccggtcagtggtcgcaatcgatcgatcgatatcatggacggcgacggcggcggcggatgggacgatcagggcaacggcggcggcgagacgaccaagtaccgtggcgtgcgtcgccggccttctggcaagttcgcggcggagatccgtgactccagcaggcagagcgtccgcgtctggctgggaaccttcgacaccgccgaggaggctgcgcgggcttacgaccgcgccgcctacgccatgcgcggccacctcgccgtcctcaacttccctgctgaggcgcgcaactacgtgcggggatcaggctcgtcgtcctcgtcccgacagcatcagcagcggcaggtgatcgagctggagtgcctagacgaccaagtgctgcaagagatgctcaagggtggcgacgatcagtacaggtcagcagctgggagcaagaggaataactactagctatatatgctgctaacctacttacaatcgcgatacatatcgaggtttggggattttcttctcacctgtgtgcagaggctgc

SEQ ID NO: 250 - protein, 136 aa, Oryza sativa (japonica cultivar-group)
  G3380
MDGDGGGGWDDQGNGGGETTKYRGVRRRPSGKFAAEIRDSSRQSVRVWLGTFDTAEEAARAYDRAAYAMRGHLAVLNFPAEARNYVRGSGSSSSSRQHQQRQVIELECLDDQVLQEMLKGGDDQYRSAAGSKRNNY

SEQ ID NO: 251 - DNA, 918 bp, Zea mays
  G3794
attacttgtgcacttgggtgcagtgcctgcagtataatcaagttagggtttaaaagaacctcgaccgcgatcgtatatagatccagattatcattagttattagaccactgtgatatcgatggacgacggcggcgagccaaccaagtaccgcggcgtgcggcgccggccgtcggggaagttcgccgccgagatccgcgactccagccggcagagcgtgcgcatgtggctgggcaccttcgacacggccgaggaggccgcaagggcgtacgaccgcgcggcctacgccatgcgcggccaaatcgccgtgctcaacttccccgccgaggcgcgcaactacgtgcgcggcgggtcgtcgtcgtcccgccagcagcagcagggaggaggaggaggaggaggaagtggcggcggcgccggtcagcaggtgatcgagctggagtgcctggacgatcaggtgctgcaggagatgctcaagggcggcgacgggaaaaaatagttgttagcgtatctgatcacaggtgcacgtgttgaaactgattatgaccaggcgatcgatcccatcttgtgcatgcggcctgccaaagttgctgggtcttctcatcgacctatatatatatgcttctcgatccatatatatatcataaatgcatgcagggtgcatgcatgtaccaagtttggaattataatgctcttggtgctgaattgaagtatactagtatatatagtgtgatccatgtattgaaaaggttgttttgcttaatcgcgtcatgattgcacacgtgcttgtttctgcttaaacaacccatatatatagccggctctggcctttgtcaagtctgcaatccttatacatcgttggtaattcatgcatgagttctatgtaactgcaatttagataaattgtagctaatataatagtc

SEQ ID NO: 252 - protein, 124 aa, Zea mays
  G3794
MDDGGEPTKYRGVRRRPSGKFAAEIRDSSRQSVRMWLGTFDTAEEAARAYDRAAYAMRGQIAVLNFPAEARNYVRGGSSSSRQQQQGGGGGGGSGGGAGQQVIELECLDDQVLQEMLKGGDGKK

SEQ ID NO: 253 - DNA, 859 bp, Arabidopsis thaliana
  G1266
caatccactaacgatccctaaccgaaaacagagtagtcaagaaacagagtattttttctacatggatccatttttaattcagtccccattctccggcttctcaccggaatattctatcggatcttctccagattctttctcatcctcttcttctaacaattactctcttcccttcaacgagaacgactcagaggaaatgtttctctacggtctaatcgagcagtccacgcaacaaacctatattgactcggatagtcaagaccttccgatcaaatccgtaagctcaagaaagtcagagaagtcttacagaggcgtaagacgacggccatgggggaaattcgcggcggagataagagattcgactagaaacggtattagggtttggctcgggacgttcgaaagcgcggaagaggcggctttagcctacgatcaagctgctttctcgatgagagggtcctcggcgattctcaatttttcggcggagagagttcaagagtcgctttcggagattaaatatacctacgaggatggttgttctccggttgtggcgttgaagaggaaacactcgatgagacggagaatgaccaataagaagacgaaagatagtgactttgatcaccgctccgtgaagttagataatgtagttgtctttgaggatttgggagaacagtaccttgaggagcttttggggtcttctgaaaatagtgggacttggtgaaagattaggatttgtattagggaccttaagtttgaagtggttgattaattttaaccctaatatgttttttgtttgcttaaatatttgattctattgagaaacatcgaaaacagtttgtatgtacttttgtgatacttggcg

SEQ ID NO: 254 - protein, 218 aa, Arabidopsis thaliana
  G1266
MDPFLIQSPFSGFSPEYSIGSSPDSFSSSSSNNYSLPFNENDSEEMFLYGLIEQSTQQTYIDSDSQDLPIKSVSSRKSEKSYRGVRRRPWGKFAAEIRDSTRNGIRVWLGTFESAEEAALAYDQAAFSMRGSSAILNFSAERVQESLSEIKYTYEDGCSPVVALKRKHSMRRRMTNKKTKDSDFDHRSVKLDNVVVFEDLGEQYLEELLGSSENSGTW

SEQ ID NO: 255 - DNA, 891 bp, Arabidopsis thaliana
  G2999
tattagggttttctttattcagaagcttcaagatcagaaaagatggaagttagagagaagaaagatgagaaaatggagatgacaagaagaaaatcatcagctctagatcatcatcgtcttcctccgtacacttactcccaaaccgccaacaaagagaaacccaccaccaaaagaaacgggtcggacccggatccggatccggatcttgatactaacccaatttctatatctcatgctccaagatcatacgctaggcctcaaactacttctccggggaaggcaaggtatagagaatgccaaaagaatcacgcggcgagctccggtggacacgttgtcgacggttgcggcgagtttatgtcttccggggaagaaggcacggtggagtctcttctttgtgcagcttgtgattgccaccggagcttccatagaaaagagatcgatggtttgtttgttgtcaatttcaatagctttggccattcacagagaccactcggaagccgccacgtgtctccgataatgatgagttttggtggtggtggtggttgtgcggcggagtcatcgacggaggatctaaacaagtttcatcaatcttttagtggttatggagtggatcagtttcatcattatcaacccaagaaacggtttaggacaaagtttaatgaagaacagaaggagaagatgatggagtttgctgagaagattggttggagaatgacaaaactagaagatgatgaagtgaatcggttttgtcgtgagattaaagttaaaagacaagtgtttaaagtttggatgcacaacaataaacaagcagcaaagaagaaggatttgtaagagatttctatatatatatatatactatttttacttctctttgttcaacattgctttaac

SEQ ID NO: 256 - protein, 262 aa, Arabidopsis thaliana
  G2999
MEVREKKDEKMEMTRRKSSALDHHRLPPYTYSQTANKEKPTTKRNGSDPDPDPDLDTNPISISHAPRSYARPQTTSPGKARYRECQKNHAASSGGHVVDGCGEFMSSGEEGTVESLLCAACDCHRSFHRKEIDGLFVVNFNSFGHSQRPLGSRHVSPIMMSFGGGGGCAAESSTEDLNKFHQSFSGYGVDQFHHYQPKKRFRTKFNEEQKEKMMEFAEKIGWRMTKLEDDEVNRFCREIKVKRQVFKVWMHNNKQAAKKKDL

SEQ ID NO: 257 - DNA, 930 bp, Arabidopsis thaliana
  G2998
atggatatgagaagccatgaaatgatagagagaagaagagaagacaatggcaacaacaatggtggtgttgttattagtaacatcattagtactaatattgatgataattgcaatggtaataacaacaacactcgtgtctcttgcaactctcaaaccctagatcaccaccaatccaagtctccctcttcgttttccatctccgccgcagctaaacccaccgtaagataccgtgagtgtctaaagaatcatgcggcgagcgtcggcggaagtgttcacgacggatgcggcgagtttatgccgagtggtgaagaaggaacaatcgaagctctcagatgcgctgcttgtgattgtcaccgtaatttccaccggaaagaaatggacggcgttggaagctcggatttgatctctcaccaccgtcatcaccactaccaccataaccaatacggtggaggaggagggagaagacctccgccgccgaatatgatgcttaacccactcatgcttcctccgccaccgaattatcagccgattcaccaccacaagtatggaatgagtcctcccggaggaggaggaatggtgacgccgatgagcgttgcttacggcggtggaggaggaggagctgagtcgtctagtgaagatctgaatctgtacggacaatcaagcggagaaggagctggtgcggcggcgggacaaatggcgttttcgatgtcgtcgtctaagaaaagattcaggacaaagttcacgacggatcagaaggagaggatgatggactttgcggagaagctagggtggaggatgaacaagcaagacgaagaagagcttaagagattctgcggcgagatcggagtgaagagacaagtcttcaaagtttggatgcataacaacaagaacaatgctaagaaaccaccaacaccaacaactactctctaa

SEQ ID NO: 258 - protein, 309 aa, Arabidopsis thaliana
  G2998
MDMRSHEMIERRREDNGNNNGGVVISNIISTNIDDNCNGNNNNTRVSCNSQTLDHHQSKSPSSFSISAAAKPTVRYRECLKNHAASVGGSVHDGCGEFMPSGEEGTIEALRCAACDCHRNFHRKEMDGVGSSDLISHHRHHHYHHNQYGGGGGRRPPPPNMMLNPLMLPPPPNYQPIHHHKYGMSPPGGGGMVTPMSVAYGGGGGGAESSSEDLNLYGQSSGEGAGAAAGQMAFSMSSSKKRFRTKFTTDQKERMMDFAEKLGWRMNKQDEEELKRFCGEIGVKRQVFKVWMHNNKNNAKKPPTPTTTL

SEQ ID NO: 259 - DNA, 1064 bp, Arabidopsis thaliana
  G3000
atgggtgataggaaacaaacacacatacgtcatcatcatccttaatttctatttctccttcttcttcatcatcaatatcaatctcatcttccactactcctcccctctaacaataagcagcatctctataatccctaagattcacaatggagcttggaggaaaatgcaatgcaattacaaccacaacaatgatctcaacagaagtaaagccacatacggatccggaaccagaagccaaacccgaatcagatccatccatggctttattcccgatcaagaaagaaaaccaaaaaccaaagacacgtgtcgaccaaggagctaagtaccgggaatgtcagaagaaccacgcggcctcaaccggaggacacgtggtggacggatgctgcgagttcatggccggcggagaagaaggtacactcggtgctttaaaatgcgccgcctgtaactgtcaccggagcttccaccggaaagaagtgtacggacacaggaacagtaaacaagatcatcagctgatgataactccggcgttttacagcagtaacagctcgtacaagccacgtgtaatgcatccaacgggtgagattggacggaggacttcatcttcaagcgaggatatgaagaagattctgagtcatcgtaaccaaaacgttgatgggaaaagtttgatgatgatgatgatgaggaagaagaagagagtgaggacaaagatcaatgaagaacaaaaggagaagatgaaggaatttgcagagagattagggtggaggatgcagaagaaagatgaagaagagattgataagttttgtaggatggtgaatctgaggagacaagtttttaaggtttggatgcataataacaagcaagcaatgaagagaaacaatagtaacattagtgaatagtttgatgatctgataaaagtgaaataaatttttacaatcctgttttgcttttatatataatttttgcccttcaaattattcaaaatcttgagtataaatctgtggaatcttgtatgttttgattgttttatattgtatctgggattatttttttcttttactaaaaaa

SEQ ID NO: 260 - protein, 249 aa, Arabidopsis thaliana
  G3000
MELGGKCNAITTTTMISTEVKPHTDPEPEAKPESDPSMALFPIKKENQKPKTRVDQGAKYRECQKNHAASTGGHVVDGCCEFMAGGEEGTLGALKCAACNCHRSFHRKEVYGHRNSKQDHQLMITPAFYSSNSSYKPRVMHPTGEIGRRTSSSSEDMKKILSHRNQNVDGKSLMMMMMRKKKRVRTKINEEQKEKMKEFAERLGWRMQKKDEEEIDKFCRMVNLRRQVFKVWMHNNKQAMKRNNSNISE

SEQ ID NO: 261 - DNA, 1284 bp, Oryza sativa (japonica cultivar-group)
  G3690
atggagtacaagagatcatcgcatgtggaggaggaggaagaggaggaagaagaggaggacgacgaggaggaagacgaggaggagcaaggtcaccatcagtacacgacggcggcggcgcagcagcagctgcacccgcaggttcttggctcgtcggcttcctcgccgtcgtcgttgatggactccgccgctttctcgaggcccctcctgcctcccaacctgtcgctcgtgtcgccgtcggcggcggcggcggcggcgcccggtggatcctacctgcatgcggctcaccaccatgggcagggaagaagggtggaggcgcctggtggggagagccagcaccatctccagcgccatcatgagccggcgagaaatggcgttcttggcggcgtcgccggtgctcacgcggcgtctacgcttgccctcgtgggtggtggtggtggtggtccgagaggcggcgagggggcggcgggcgaggcgccgacgtggaggtacagggagtgcctcaagaaccacgcggcgcggatgggcgcgcacgtgctcgacggctgcggcgagttcatgtcgtcccctggcgacggcgccgcggcgctggcctgcgccgcgtgcggctgccaccgtagcttccaccgccgcgagccggcggtcgtcgcgccggcctcgctctcgctctgccccgcctccgcctccgcctccgccgccgccggcctggtgtccctatccccctccgcgacgcccaccggcgccaactcctcccggctcatgccgctcctcctcgccccgccgcacatgcagaagcgcccgcccgtcctccccgtgtccccggcgtctgcgcccgccgcgctggccgagtcgtcaagcgaggagctgcgcccgccgccgctcccctcttcccacccccacgcgcacgcggccgccgtggtggcggcgtcggcctccgcgccgccggggccgagcaagaagcgcttccggaccaagttcacggcggagcagaaggagcggatgcgtgaattcgcgcaccgcgtcgggtggcgcatccacaagcccgacgccgccgccgtcgacgcgttctgcgcccaggtcggcgtctcccgccgcgtcctcaaggtgtggatgcacaacaacaaacacctcgccaagacgcccccgtcgccgacatcgcagccgccgccgccgccgctccaccacgatccttctcctcctccccctcctcaccaccaccaccaccaccatcaccaccaccacccaccacaacaccatcagcagcagcagcagcagcatgatgcatga

SEQ ID NO: 262 - protein, 427 aa, Oryza sativa (japonica cultivar-group)
  G3690
MEYKRSSHVEEEEEEEEEEDDEEEDEEEQGHHQYTTAAAQQQLHPQVLGSSASSPSSLMDSAAFSRPLLPPNLSLVSPSAAAAAAPGGSYLHAAHHHGQGRRVEAPGGESQHHLQRHHEPARNGVLGGVAGAHAASTLALVGGGGGGPRGGEGAAGEAPTWRYRECLKNHAARMGAHVLDGCGEFMSSPGDGAAALACAACGCHRSFHRREPAVVAPASLSLCPASASASAAAGLVSLSPSATPTGANSSRLMPLLLAPPHMQKRPPVLPVSPASAPAALAESSSEELRPPPLPSSHPHAHAAAVVAASASAPPGPSKKRFRTKFTAEQKERMREFAHRVGWRIHKPDAAAVDAFCAQVGVSRRVLKVWMHNNKHLAKTPPSPTSQPPPPPLHHDPSPPPPPHHHHHHHHHHHPPQHHQQQQQQHDA

SEQ ID NO: 263 - DNA, 895 bp, Arabidopsis thaliana
  G2997
atactcttaactctcatgaattattggtctctctattatagttttttaagtaacaatctaattgtagtacggatgtctcttgagatgttcaagaattaagaaataaagaaagagggatcggagaatgaattttgaggatcaagaagaagatatggagatgtcaggtgttaatcccccctgcggttacgactctctaagcggtgagggagccacatctagtggtggtggaggagtaggaaggagtaaaggagttggagcgaagataaggtatagagagtgcttgaagaaccatgctgttaacataggtggccacgccgtggacggttgttgcgagtttatgccttccggtgaagatggaacgctcgacgctcttaagtgtgcagcttgcggctgccaccgcaacttccaccgcaaggaaaccgaaagcatcggcggtagagcccacagagttcccacgtactacaaccgcccgccgcagccgcatcagccgcctggatatcttcatctaacatctcccgcggcgccttacaggccacccgcggcatcgggggacgaggaggatacatcaaatcctagcagcagcggcgggaccacgaagaggtttagaacgaagttcacggcggaacagaaagagaagatgttagcctttgcggagaggttggggtggagaattcagaagcatgatgacgtggcggttgagcagttctgtgcggagactggtgttaggagacaagtgcttaaaatctggatgcataacaacaagaactctcttggtaagaaaccctaattttgctcgagacatgatttaaaacactagaggatcataattgtttctttttttggtatgactcttctgtaactacttctgcttattagttatgttattttttcctgg

SEQ ID NO: 264 - protein, 220 aa, Arabidopsis thaliana
  G2997
MNFEDQEEDMEMSGVNPPCGYDSLSGEGATSSGGGGVGRSKGVGAKIRYRECLKNHAVNIGGHAVDGCCEFMPSGEDGTLDALKCAACGCHRNFHRKETESIGGRAHRVPTYYNRPPQPHQPPGYLHLTSPAAPYRPPAASGDEEDTSNPSSSGGTTKRFRTKFTAEQKEKMLAFAERLGWRIQKHDDVAVEQFCAETGVRRQVLKIWMHNNKNSLGKKP

SEQ ID NO: 265 - DNA, 774 bp, Zea mays
  G3676
cggcagggagctaggggcaggcatgctctgatggaattcaggggccaggaggaggaggagcagcccgtctcggaggagatgggcgccagctccgcgccgtcgtccgcccccacccccgccccggggaaccaggaccacgccgccgaggcgaggtaccacgagtgcctgcggaaccacgcggcggcgctgggcggccacgtcgtcgacggctgcggggagttcatgcccggggacggcgacagtctcaagtgcgccgcatgcggctgccaccgcagcttccaccgcaaggacgacgcgcgccgccgccaccaccaactcatgctcccggcgaccgcgacgtcctctcgcgtcccgctgctcctgcctccgccccacccgcactacgcgccgccgccgttcccgtaccacggcacgcccagcggcggcggcggcggcaccgccaccgagtcgtccagcgaggagcgcggcccgccgtccggggccgccgccgtgcaggcgcagggccacgtccggcggaagcggttccggaccaagttcacgccggagcagaaggagcagatgctggcgttcgcggagcgcctcggctggcggttgcagaagcaggacgacgcgctggtgcagcacttctgcgaccaggtcggcgtgcgccgccaggtattcaaggtctggatgcacaacaacaagcacaccggcaggaggcagcagccgcacctgccgccgccgcaggggcagcaacagccccaacagcagccgaagtagccacggtgggagaca

SEQ ID NO: 266 - protein, 242 aa, Zea mays
  G3676
MEFRGQEEEEQPVSEEMGASSAPSSAPTPAPGNQDHAAEARYHECLRNHAAALGGHVVDGCGEFMPGDGDSLKCAACGCHRSFHRKDDARRRHHQLMLPATATSSRVPLLLPPPHPHYAPPPFPYHGTPSGGGGGTATESSSEERGPPSGAAAVQAQGHVRRKRFRTKFTPEQKEQMLAFAERLGWRLQKQDDALVQHFCDQVGVRRQVFKVWMHNNKHTGRRQQPHLPPPQGQQQPQQQPK

SEQ ID NO: 267 - DNA, 743 bp, Oryza sativa (indica cultivar-group)
  G3686
gtacgtggctggcatggagctcagcgagcacgaggaggacgccggcgacgtgggcggtggctgctcatccccgcccacgccgcctcaccgcgtgctgacgtcggccgcccccgagacgatcaggtgccggtaccacgagtgcctccggaaccacgcggcggcctcgggcggccacgtcgtggatggctgcggcgagttcatgccggcgtccaccgaggagccgctcgcctgcgcggcctgcggctgccaccgcagcttccaccgccgggacccttccccgggccgcgcgggcgcagcacggctgccgcagctgcacctgccggcgtccatcaactcgcgcgcaccacccgcgctgctgctgccgcctgcagcggccgccagcaagcaaggtttgccgttccctggctacggcacgcccagcggcggcactggcaccacgaccgcgtcctccagcgacgagcggctgcggccctcgccggtgcagccacggaggcggtcacgcacgacgttcacgcgggagcagaaggagcagatgctggcgttcgcggagcgcgtggggtggaggatccagcggcaggaggaggcgacggtggagcacttctgcgcgcaggtcggcgtccggaggcaagcgctcaaggtgtggatgcacaacaacaagcatagcttcaagcagaaacagcagcaggagaacaggcaggaacagcagcagtaggcaggatgccatgtatgggaggagacaaagg

SEQ ID NO: 268 - protein, 232 aa, Oryza sativa (indica cultivar-group)
  G3686
MELSEHEEDAGDVGGGCSSPPTPPHRVLTSAAPETIRCRYHECLRNHAAASGGHVVDGCGEFMPASTEEPLACAACGCHRSFHRRDPSPGRAGAARLPQLHLPASINSRAPPALLLPPAAAASKQGLPFPGYGTPSGGTGTTTASSSDERLRPSPVQPRRRSRTTFTREQKEQMLAFAERVGWRIQRQEEATVEHFCAQVGVRRQALKVWMHNNKHSFKQKQQQENRQEQQQ

SEQ ID NO: 269 - DNA, 886 bp, Arabidopsis thaliana
  G2996
gtttcacatttctcgacttcttgaatggagtttgaagacaacaacaacaacaacgacgaagagcaagaagaggatatgaatcttcatgaggaagaagaagacgacgacgccgtttacgactctcctcctctctctcgtgttctccccaaagcctcgacagaaagtcatgaaaccaccggaactacttccacaggcggtggcggaggattcatggttgttcacggcggtggagggagcaggtttaggttccgtgagtgtctcaagaaccaagcggtgaacataggaggacacgcggtcgatggttgtggtgagtttatgccagctggaatcgaaggtaccatcgacgctctaaaatgcgccgcttgtggctgtcaccgtaacttccaccgcaaggaattaccttacttccatcacgcgccgccacaacatcagcctcctcctcccccgccagggttttaccgtcttccagctccggttagctaccgaccaccaccgtcacaagctcctcctcttcagctcgctcttccccctccacaaagagagagatcagaagatccaatggagacgtcttcagctgaagcaggaggagggattaggaagaggcataggactaagtttacggctgagcaaaaggaaaggatgttagctttagctgagaggattggatggagaattcagagacaagacgatgaagtgattcagagattttgtcaggagactggtgttccgagacaagttcttaaggtttggttacataacaacaaacacactcttggtaagtcgccttcaccacttcatcatcatcaggctcctcctcctccaccaccacagtcttcgtttcatcatgaacaagaccaaccatgaatcttgaatttctttgatcact

SEQ ID NO: 270 - protein, 279 aa, Arabidopsis thaliana
  G2996
MEFEDNNNNNDEEQEEDMNLHEEEEDDDAVYDSPPLSRVLPKASTESHETTGTTSTGGGGGFMVVHGGGGSRFRFRECLKNQAVNIGGHAVDGCGEFMPAGIEGTIDALKCAACGCHRNFHRKELPYFHHAPPQHQPPPPPPGFYRLPAPVSYRPPPSQAPPLQLALPPPQRERSEDPMETSSAEAGGGIRKRHRTKFTAEQKERMLALAERIGWRIQRQDDEVIQRFCQETGVPRQVLKVWLHNNKHTLGKSPSPLHHHQAPPPPPPQSSFHHEQDQP

SEQ ID NO: 271 - DNA, 862 bp, Arabidopsis thaliana
  G3001
gaactcattttctctcttcttcttcatcatcatcatcaatggatgagataaaaccaaagaaagaagagaattccaaacgacgtcgtaacgtcaaacccatttgccgtgaaactggagaccacgtccattatcttccaacatgcaaaaccaagcccaaacccacgcgtactcatcacgcgccaccaccgatcctcgactcaatcttcaaagtcactcacaagccacactactacgaatgcaggaagaatcacgccgctgatatcggaaccaccgcttacgacggctgcggcgagtttgttagctccaccggtgaagaagattctttaaactgcgccgcatgtggctgtcaccgtaacttccaccgtgaagagttaatcccggagaacggcggcgttactgagacggttcttgaagttctcaagatttcatcgtgtcagtttcgtcggatcttttgctcaccttacggcggtggaaaaagcgaaggaaagaagaagaagaaggagaaggagagttatggaggggatccgataattaaagatcgattcggcggtgcggaggaggaggaggggatagtgaagaggttgaaaacgaagttcacggcggagcaaacggagaaaatgagggattatgcggagaagcttcggtggaaggtgagacctgagaggcaggaggaggttgaagagttttgtgtagagattggagtgaatcggaagaattttaggatttggatgaataatcacaaggataaaattataattgatgaatgattatttaccaaacttaattgtgttacttttcttttcattctactttgttttaatttgtgtttgatttagtgtaatgtataaataacaagctcatt

SEQ ID NO: 272 - protein, 242 aa, Arabidopsis thaliana
  G3001
MDEIKPKKEENSKRRRNVKPICRETGDHVHYLPTCKTKPKPTRTHHAPPPILDSIFKVTHKPHYYECRKNHAADIGTTAYDGCGEFVSSTGEEDSLNCAACGCHRNFHREELIPENGGVTETVLEVLKISSCQFRRIFCSPYGGGKSEGKKKKKEKESYGGDPIIKDRFGGAEEEEGIVKRLKTKFTAEQTEKMRDYAEKLRWKVRPERQEEVEEFCVEIGVNRKNFRIWMNNHKDKIIIDE

SEQ ID NO: 273 - DNA, 1096 bp, Oryza sativa (japonica cultivar-group)
  G3685
taacccaaagccatccagcactttgcgaggtcgctttcgtttcgcctccttcgtcggccccggaccggaccggacagaggcatgtcctgatggaattcaggggccatgacgaacccgtcgacgagatgggagtcgcgtacggcaggacgccaccctcctcctcctcctcccccgccgcctccgcctccgcggggaacggcgccggcgcggcggaggtgaggtaccacgagtgcctgcgcaaccacgccgcggcgatgggcggccacgtcgtggacggatgcagggagttcatgccgatgccgggggacgccgccgacgccctcaagtgcgccgcctgcggctgccaccgcagcttccaccgcaaggacgacgggcagcagcagcagcagctgcgcctgctcatcccgtccccgcccacgccgcgcgtcccgctgctcatgccgccgccgcagccgcagccgcacccgcacccgcaacacccctacctgcacccgccgttcccgtaccaccacaccccaagcggcagcggcggcacgacgaccgagtcgtccagcgaggagcgggggcctccctcctcgtcggcggcggcggcgcaggggcggcggaagcggttccggaccaagttcacgccggagcagaaggagcagatgctggcgttcgcggagcgggtggggtggcggatgcagaagcaggacgaggcactcgtcgaacagttctgcgcgcaggtcggcgtgcggcgccaggtgttcaaggtgtggatgcacaacaacaagagcagcatcggcagcagcagcggcggcggcagtaggaggcagccgcaggagcaacagtcacaacagcagcagcagcagcagtagccatgggaggagacaagcatttggttaatggtttggtaaatccccacctcattatttttatacgcccaagacatgaggagacgggttaaacaacgcaacggaagtgaggactactctctctgcgatctttatcctctctctctctctctctctctcttcatttggccttaaccttcattctttgtagtcacttatcctcctccataatttggttcttgattctagccttgtccaatttg

SEQ ID NO: 274 - protein, 255 aa, Oryza sativa (japonica cultivar-group)
  G3685
MEFRGHDEPVDEMGVAYGRTPPSSSSSPAASASAGNGAGAAEVRYHECLRNHAAAMGGHVVDGCREFMPMPGDAADALKCAACGCHRSFHRKDDGQQQQQLRLLIPSPPTPRVPLLMPPPQPQPHPHPQHPYLHPPFPYHHTPSGSGGTTTESSSEERGPPSSSAAAAQGRRKRFRTKFTPEQKEQMLAFAERVGWRMQKQDEALVEQFCAQVGVRRQVFKVWMHNNKSSIGSSSGGGSRRQPQEQQSQQQQQQQ

SEQ ID NO: 275 - DNA, 1144 bp, Arabidopsis thaliana
  G2993
tctctttctctctctctctctctctctctttatcttctttcttcaaagtctatcactttataaaaccctaattaaatctctaaactccttagcctctctctattctcagaaccttgtggttattctcaagaaaggtttcattttgagataaagtttgctgctctttctggttgtggatagatcaaaagaatggagattgcaagtcaagaagatcctattccaataaacactagttatggtaatagtggaggtgggcatgggaacatgaaccatcatcatcatgccaattctgcaccatcatctctcaacattactacttcaaacccactactagtctcctcaaatagtaatggtcttggtaaaaatcatgatcattctcatcatcatcatgtgggttacaacatcatggttaccaacatcaagaaagagaagcctgtggtgataaagtacaaggaatgcctaaagaaccatgcagctaccatgggaggcaatgccattgatggttgtggagagtttatgccaagtggtgaagaaggttccattgaagctctcacttgctcagtttgcaactgccatagaaactttcatagaagagaaaccgaaggtgaagagaaaacattcttttccccttacctcaaccaccaccaaccacctccgcagcagagaaaactcatgttccaccacaagatgatcaaatcaccattaccacaacaaatgataatgcctattggcgttacaaccgctggatccaactcagagtcagaggatcttatggaggaagaaggcggaggaagcttgacattccggcagccaccaccaccaccatcaccgtatagttacggacataatcagaagaaaaggtttaggacaaagtttacacaagagcaaaaggagaagatgattagttttgcggaaagagttggttggaagattcagagacaagaggaatctgttgttcaacagctttgtcaagagattggaattaggagaagagttcttaaagtttggatgcacaacaacaaacaaaatctctccaagaagagcaacaacgttagtaacaatgtcgacctttctgctggtaataacgacattactgaaaatcttgcttctactaatccttagttaagttcagattgttgttata

SEQ ID NO: 276 - protein, 310 aa, Arabidopsis thaliana
  G2993
MEIASQEDPIPINTSYGNSGGGHGNMNHHHHANSAPSSLNITTSNPLLVSSNSNGLGKNHDHSHHHHVGYNIMVTNIKKEKPVVIKYKECLKNHAATMGGNAIDGCGEFMPSGEEGSIEALTCSVCNCHRNFHRRETEGEEKTFFSPYLNHHQPPPQQRKLMFHHKMIKSPLPQQMIMPIGVTTAGSNSESEDLMEEEGGGSLTFRQPPPPPSPYSYGHNQKKRFRTKFTQEQKEKMISFAERVGWKIQRQEESVVQQLCQEIGIRRRVLKVWMHNNKQNLSKKSNNVSNNVDLSAGNNDITENLASTNP

SEQ ID NO: 277 - DNA, 1098 bp, Zea mays
  G3681
cgtcatgttccccaacggcgccgccttcaagaaggcgaagccggcggccgtggcgccggccggggagccgctgtaccgggagtgcctcaagaaccacgccgcgagcctgggcgggcacgccgtggacgggtgcggcgagttcatgccctcgccgggggccaaccccgccgacccgacgtcgctcaagtgcgcggcgtgcgggtgccaccgcaacttccaccgccggacggtggagggttccccgccgcagcctgcgcccgcgccgctggcgctcccgccgccgccgccgccgccgccgagcgtgctgcacggccagacgcaccgcggcggggaggatacgcccgaggaccgccacccgggggtagtcgacgccgacgaccccgattccgactcggagggctcggagtacgacgaggagcggtcagtgtccccgccaccgccgcaccacgtgccggcgccggtggcgcagcaacccccgccgccgtcatacttcccggcggcggcgccgcaccagcacatgctgctctcgcttggtcctggcgccgcggtggcggccgcggcgcagaggctggccccagcccagctgacgccgtcgagcgcgccgcctcccgggggcgcgatgcccaggaagcggttccgcaccaagttcaccgccgagcagaagcagcggatgcaggagctgtcagagcggctcgggtggcggctgcagaagcgcgacgaggccgtcgtggacgagtggtgccgcgacatgggcgtcggcaagggcgtcttcaaggtctggatgcacaacaacaagcacaacttcttgggcggacacagcgcccgccgcagcgtctctgcctcctcaggcgctgctgcgctcctccaaaccccatgcgccaacgccggcgctgctgcaccgtcattcaacccgtccaggctcacccctccccctcccgtcctcacatcgtccccgaccggcttcaacatcaacggcgccgcctcctcctcgccgcccaccgtcaccgccgaccacacggacaacgccaacggagcttcatcgccgcactccgcttaagctagagaggagagggaagcgagaatggagagacaaacatg

SEQ ID NO: 278 - protein, 350 aa, Zea mays
  G3681
MFPNGAAFKKAKPAAVAPAGEPLYRECLKNHAASLGGHAVDGCGEFMPSPGANPADPTSLKCAACGCHRNFHRRTVEGSPPQPAPAPLALPPPPPPPPSVLHGQTHRGGEDTPEDRHPGVVDADDPDSDSEGSEYDEERSVSPPPPHHVPAPVAQQPPPPSYFPAAAPHQHMLLSLGPGAAVAAAAQRLAPAQLTPSSAPPPGGAMPRKRFRTKFTAEQKQRMQELSERLGWRLQKRDEAVVDEWCRDMGVGKGVFKVWMHNNKHNFLGGHSARRSVSASSGAAALLQTPCANAGAAAPSFNPSRLTPPPPVLTSSPTGFNINGAASSSPPTVTADHTDNANGASSPHSA

SEQ ID NO: 279 - DNA, 1011 bp, Arabidopsis thaliana
  G2989
taagcttaacataaaccctaatattttcttgatttttttcaagaaaataaaaacataaagatgcttgaagttagatcaatggatatgactccaaaatcaccagaacccgaatccgaaactccgacccggatccaaccagctaaaccaatctctttcagtaacggaatcatcaaacgccaccaccaccaccaccacaacaacaacaaagtcacttacaaagaatgtctcaagaaccacgcggcggcgattggtggtcacgcgcttgacggttgcggcgaatttatgccgtctccttcgtcaacaccttccgatccaacttctctcaagtgtgcagcttgtggttgtcaccgtaacttccaccgccgtgaaactgacgattcctccgccgttccaccaccgtctcttcttccatcttcaacaacaaccgccgcaattgagtatcagcctcatcaccgtcatcatcctcctcctccgctagctcctccgttaccacgtagtcctaattcatcttctccgccgcctatctcttcctcctacatgcttttagctctctccggtaataataaaaccgcaccgttctcagatctaaacttcgccgccgcggctaaccatctctccgccacgcctggctcgaggaagcgattcaggacgaagtttagctcaaatcagaaagagaagatgcatgaattcgccgatcgaatcggttggaagattcagaaacgtgacgaagacgaagttcgtgatttttgccgtgagatcggagttgataaaggtgttctcaaagtttggatgcataataacaaaaactccttcaaattctccggcggaggagcaaccaccgtgcagagaaacgataacggtatcggcggcgagaacagtaacgatgatggagttcgcggtttagctaacgacggtgacggtggtggtgggagatttgagagtgatagtggaggagctgatggtggcggaaacgtaaacgcctcgtcgtcttcgtcgtgaagaagaaaacat

SEQ ID NO: 280 - protein, 312 aa, Arabidopsis thaliana
  G2989
MLEVRSMDMTPKSPEPESETPTRIQPAKPISFSNGIIKRHHHHHHNNNKVTYKECLKNHAAAIGGHALDGCGEFMPSPSSTPSDPTSLKCAACGCHRNFHRRETDDSSAVPPPSLLPSSTTTAAIEYQPHHRHHPPPPLAPPLPRSPNSSSPPPISSSYMLLALSGNNKTAPFSDLNFAAAANHLSATPGSRKRFRTKFSSNQKEKMHEFADRIGWKIQKRDEDEVRDFCREIGVDKGVLKVWMHNNKNSFKFSGGGATTVQRNDNGIGGENSNDDGVRGLANDGDGGGGRFESDSGGADGGGNVNASSSSS

SEQ ID NO: 281 - DNA, 914 bp, Arabidopsis thaliana
  G2991
aagtttacaaaacatttcttcttcttgtttttcgaaaccctaaatgttttgagttgtcatggatgtaatagctactacaactactatagtatccgacttggattcacgacaacccgaaatcgaagctccgatccggatccagcccgcgaagcctatttctttctcaaacggcaaacgctgccaccaccatcatcttgcatctgaagcggttgcggttgcgacttataaagaatgtctaaagaatcacgcagcaggtatcggcggtcacgctttagacggatgcggcgagtttatgccgtcaccgtcgtttaactccaatgaccccgcttcactaacgtgcgctgcttgtggttgccaccgtaacttccaccgccgtgaggaggatccatcttctctctctgccatcgtccctgcgatcgaatttcgacctcacaaccgtcaccagcttcctccaccgcctcctcctcatctggcggggattcgtagtccagacgacgatgattcagcttctccaccgccgatctcgtcttcttacatgcttctcgcactctctggaggaagaggaggagctaacacggcggttccaatgtctaggaaacgttttaggacgaagtttagtcagtatcagaaggagaagatgttcgagttctcggagagagttgggtggaggatgccgaaagctgatgacgtggtggttaaggagttttgtcgggagattggagttgataaaagcgttttcaaagtgtggatgcataacaacaagatttcaggacgcagcggcgctagaagagctaacggcggagtagtagtaggaggagtaggagatagtcgtcagagtgttgttccgacaaatgggtcgttttcttcgacgtgaggaaaagaatggaaagcgttgaaaaagcgtcgtcgtttta

SEQ ID NO: 282 - protein, 271 aa, Arabidopsis thaliana
  G2991
MDVIATTTTIVSDLDSRQPEIEAPIRIQPAKPISFSNGKRCHHHHLASEAVAVATYKECLKNHAAGIGGHALDGCGEFMPSPSFNSNDPASLTCAACGCHRNFHRREEDPSSLSAIVPAIEFRPHNRHQLPPPPPPHLAGIRSPDDDDSASPPPISSSYMLLALSGGRGGANTAVPMSRKRFRTKFSQYQKEKMFEFSERVGWRMPKADDVVVKEFCREIGVDKSVFKVWMHNNKISGRSGARRANGGVVVGGVGDSRQSVVPTNGSFSST

SEQ ID NO: 283 - DNA, 1107 bp, Arabidopsis thaliana
  G2990
agtcttttttttcttcaaattattggttatattaatgttttaagctatgatggatatgactcctacaataacaacaacaacaacaccaactcctaaatcacccgaacccgaatccgaaactccgacccggatccaaccggcgaaacccatttcctttagcaacggcatcatcaaacgccaccaccaccaccaccatcctctcctctttacttacaaagaatgtctcaaaaaccacgcggcggctttaggtggtcacgctctcgacggttgcggcgaattcatgccgtctccgtcgtcaatctcctccgatccaacttctctcaaatgtgctgcttgtggctgccaccgtaatttccaccgccgtgatccagataacaacaacgactcttcccaaatccctcctcctccttccaccgccgtagagtatcaacctcaccaccgtcatcatccaccaccaccaccacctcctccaccaccacgtagtcctaactcagcttctcctccaccaatctcttcctcttacatgctcttatctctctccggtactaataacaacaacaacaacttagcttctttctccgatcttaacttctccgccggaaacaaccaccaccaccaccaccaacatactcttcacggatctcgtaaaagattccgaacaaaattcagccagtttcagaaagagaagatgcatgaattcgccgaacgtgttggttggaagatgcaaaaacgtgacgaagacgatgttcgtgatttttgccggcagatcggagttgataaaagtgttctcaaagtttggatgcataacaacaaaaacacctttaaccgccgtgatatcgccggaaacgagatccggcaaatcgataacggcggaggaaaccacactccgattctcgccggcgagattaataaccataacaatggacaccacggtgtcggaggaggaggagagcttcaccagagtgttagtagcggcggtggtggcggaggatttgatagtgatagcggcggagctaacggtggtaacgttaacggatcatcgtcgtcgtgaagttaaagatgagagtgtcaggttaataagaagcttagagtaagcttattcggata

SEQ ID NO: 284 - protein, 334 aa, Arabidopsis thaliana
  G2990
MMDMTPTITTTTTPTPKSPEPESETPTRIQPAKPISFSNGIIKRHHHHHHPLLFTYKECLKNHAAALGGHALDGCGEFMPSPSSISSDPTSLKCAACGCHRNFHRRDPDNNNDSSQIPPPPSTAVEYQPHHRHHPPPPPPPPPPRSPNSASPPPISSSYMLLSLSGTNNNNNNLASFSDLNFSAGNNHHHHHQHTLHGSRKRFRTKFSQFQKEKMHEFAERVGWKMQKRDEDDVRDFCRQIGVDKSVLKVWMHNNKNTFNRRDIAGNEIRQIDNGGGNHTPILAGEINNHNNGHHGVGGGGELHQSVSSGGGGGGFDSDSGGANGGNVNGSSSS

SEQ ID NO: 285 - DNA, 729 bp, Arabidopsis thaliana
  G2992
atggatttgtcttccaaaccacaacaacaacttctaaactctcttcccatcgccggagaactaactgtcaccggagaaatgggtgtttgttacaaagagtgtttgaaaaaccacgcggctaatctcggcggccatgctctcgacggttgcggcgagtttatgccgagtcccacggctacttccaccgatccttcttctctccgttgcgctgcttgtggctgccaccgtaacttccaccgccgtgacccttccgagaatctcaacttcctcaccgcgcctccgatttcttctccctccggcactgagtcgccgccgtctcgtcacgtgtcttctcctgttccttgctcttactacacctcagctcctccacatcacgtgattctctctctcagctccggtttccctggaccgtcagatcaagatccaacggtggttaggtcagagaacagttcaagaggagcaatgaggaaacgaacaagaaccaaattcacgccggagcagaagatcaagatgagagccttcgcagagaaagctggttggaaaatcaacggatgtgatgaaaagtcggtgagagagttttgtaacgaagttgggattgagagaggagttcttaaagtgtggatgcataacaacaagtactcacttctcaatggcaagatcagagagatcgaacatggcctgtgtctgaacactcacagcaatgatggtgatgggtcttcatcttcttga

SEQ ID NO: 286 - protein, 242 aa, Arabidopsis thaliana
  G2992
MDLSSKPQQQLLNSLPIAGELTVTGEMGVCYKECLKNHAANLGGHALDGCGEFMPSPTATSTDPSSLRCAACGCHRNFHRRDPSENLNFLTAPPISSPSGTESPPSRHVSSPVPCSYYTSAPPHHVILSLSSGFPGPSDQDPTVVRSENSSRGAMRKRTRTKFTPEQKIKMRAFAEKAGWKINGCDEKSVREFCNEVGIERGVLKVWMHNNKYSLLNGKIREIEHGLCLNTHSNDGDGSSSS

SEQ ID NO: 287 - DNA, 782 bp, Arabidopsis thaliana
  G2995
cagagtataaacgcactagtgagtgaaataagaatcagacatgagctcgttatcaaaaccaaacagacaatttttgtcaccaacaacaaacaaccaagacaccggcagagaacaaacaatcgcctgcgcccgagatatggttgtcttgtacaacgagtgccttaaaaaccacgcggtcagtctcggaggccacgctcttgacggctgcggtgagttcacaccaaagtcaaccaccatcctcacggaccctccgtcccttaggtgcgatgcttgtggctgccatcgcaacttccaccgtcgtagtccttctgacggcttcagtcagcaccggtcaccaccgtctccgttacagctgcagccactcgcccctgttccgaacttgcttctctctcttagctccggtttctttggaccctcggatcaagaagtcaagaacaaatttacggtggaaagggatgttaggaagactgcgatgattaagaaacataagaggacgaaattcacggcggagcagaaggtgaagatgagaggtttcgcggagagagcggggtggaagattaacggctgggatgagaagtgggtgagagagttttgtagtgaagttggaatagagagaaaagttcttaaggtttggatccacaacaataagtactttaacaacgggaggagcagagacacgacgtcctctatgtctttgaatttgaagttgtagatctctttacagtgatgggtcttcatcttcttgagataaggaaaaaccgaaacaaaaagaggttacggta

SEQ ID NO: 288 - protein, 191 aa, Arabidopsis thaliana
  G2995
MVVLYNECLKNHAVSLGGHALDGCGEFTPKSTTILTDPPSLRCDACGCHRNFHRRSPSDGFSQHRSPPSPLQLQPLAPVPNLLLSLSSGFFGPSDQEVKNKFTVERDVRKTAMIKKHKRTKFTAEQKVKMRGFAERAGWKINGWDEKWVREFCSEVGIERKVLKVWIHNNKYFNNGRSRDTTSSMSLNLKL

SEQ ID NO: 289 - DNA, 721 bp, Arabidopsis thaliana
  G3002
ccctaaacgcaaaaatcattactcaaaaaaaaacaaagtctctctcttctaattagagagccaagaagatgcagagtacttgtgtctacagagaatgcatgcgcaaccacgccgcgaagctcggctcttacgccatcgatggctgccgtgaatactctcaaccatccaccggcgatctctgcgtcgcctgtggttgccaccgcagctaccaccgtcgtatagacgtcatatcttctcctcaaatcaatcacacgcgcttcccgttcacgagcttaaggcgcgtgaagcagctggcgaggctgaaatggaaaacggctgaggaaagaaatgaggaggaggaggatgacacggaggagacttcgacggaagagaagatgacggtgcagaggcggaggaagtcaaagttcacggcggagcagagagaggcgatgaaagattacgcggcgaagttgggatggacgttgaaggataagagagcgcttagagaagagataagagtcttctgtgaagggattggtgttactcgttatcattttaaaacttgggttaacaataataaaaagttttatcactaactaattaactaatatccttaattgagataatactataatttagttccaatttcattttcatcccttctgtgttaatttctcctccttgatcgcttattttaatggattattattttatcaaaaaaaaaaaaaaaaaaaaaaaaaaa

SEQ ID NO: 290 - protein, 168 aa, Arabidopsis thaliana
  G3002
MQSTCVYRECMRNHAAKLGSYAIDGCREYSQPSTGDLCVACGCHRSYHRRIDVISSPQINHTRFPFTSLRRVKQLARLKWKTAEERNEEEEDDTEETSTEEKMTVQRRRKSKFTAEQREAMKDYAAKLGWTLKDKRALREEIRVFCEGIGVTRYHFKTWVNNNKKFYH

SEQ ID NO: 291 - DNA, 1621 bp, Arabidopsis thaliana
  G3086
aagtttctctcacgttctcttttttaattttaatttctcgccggaaacaatctcatctcccggcgaacgaaacttccggtgtggtactgcaaacggagaaaaaaataaccaaagaagagagaaactcaaaagctactaagatggaatcagaattccagcaacatcacttccttctccacgatcatcaacaccagagaccaagaaactcaggattgattcgttaccaatcagcaccaagttcgtacttttcgagtttcggtgaatcaatcgaagagtttttagatcgacccacaagtcctgaaactgagcgaatcttatctggctttttacaaaccaccgacacaagcgacaacgttgatagtttccttcaccatacttttaacagtgatggaactgagaagaaacctccggaagttaaaacagaggacgaagatgctgaaattccggtgactgcgacggcgacggcgatggaggttgttgtttccggtgatggtgaaatctcagtgaatcctgaagtatcgattgggtatgtggcttcggtttcgaggaataagagaccaagagagaaagatgatcggactccggtgaataatctagctcgtcataatagttcaccggccggattattttcatccattgatgttgaaacagcttatgcagctgtaatgaaaagtatgggaggttttggaggaagtaatgtgatgagtacaagcaatactgaagcttcgtctcttactcctagaagcaagttacttcctcctacttctagagcgatgagtccgatctctgaggttgatgttaaacccggtttctcgtctagattgcctcctcggacgctttccggtgggtttaatcgttcttttgggaatgaagggtctgcttcttccaagcttacagctcttgctaggacccaatctggaggtctagatcaatacaaaaccaaggatgaggattcagcaagtagacgtcctcctttggcacatcacatgagtttgcccaagtctttatcagatattgaacagttactgtcagattctatcccatgtaagatcagagccaagcggggttgtgcaactcatcctcgaagcatagccgagagggtgagaagaaccaagatcagtgaaagaatgaggaagctgcaagaccttgttccaaacatggacacgcaaacaaacacagcagacatgttggatcttgcggttcaatacatcaaggacctgcaagaacaagtgaaggcgctcgaagagagtcgggcaagatgtagatgctctagtgcgtgaaactagaagtgggagtatgcgcgagtgctagccagggagggagttgtgcatagaagtatcggttcggcctttggagaaaagtcgaagatagcaaagtagagaagagatcatgaacaaagctaaatttggtggtggtggtgaaaagggtttttgtaaagttggaacctttttttggtagggaagaaagtagcaaggttgtgtaatggtccgaactccaatgctattgtatgttcttacatccaaaaaaaagaaaagcagaagagaagtgatgtacaatgagaagcttattttattgtaactcaagaataattcaggtaattagtttaaaaaaaaaaaaaaaa

SEQ ID NO: 292 - protein, 379 aa, Arabidopsis thaliana
  G3086
MESEFQQHHFLLHDHQHQRPRNSGLIRYQSAPSSYFSSFGESIEEFLDRPTSPETERILSGFLQTTDTSDNVDSFLHHTFNSDGTEKKPPEVKTEDEDAEIPVTATATAMEVVVSGDGEISVNPEVSIGYVASVSRNKRPREKDDRTPVNNLARHNSSPAGLFSSIDVETAYAAVMKSMGGFGGSNVMSTSNTEASSLTPRSKLLPPTSRAMSPISEVDVKPGFSSRLPPRTLSGGFNRSFGNEGSASSKLTALARTQSGGLDQYKTKDEDSASRRPPLAHHMSLPKSLSDIEQLLSDSIPCKIRAKRGCATHPRSIAERVRRTKISERMRKLQDLVPNMDTQTNTADMLDLAVQYIKDLQEQVKALEESRARCRCSSA

SEQ ID NO: 293 - DNA, 798 bp, Glycine max
  G3768
atggagcaaggatcgttttcaatgggactcaggcatagtggaaataattctaaccttaccaggcatagtagctctcccgcaggactattttcccaaattaacattgaaaatgtgtatgctggtgtgagaggcatggggagtttgggagctgttaacaacagtatcgaagatgcgaaattttctagttcgaggaggttgaagaatcaaccgaactattcttcgtcggggagaatgtcgtccattgctgaaattggggacaaagggtatagagaaagtagtccagacagtgaagcttttgctgatggtaacgattttatggccggttaccaagttggtcattgggatgatactgcaatgatgtctgacaacgttggtggtctcaaaagatttagtgaagaagattcaaaaccattttctggcttaaatgcggttgagactcagaatgaaacgggacagactcatgctcctttggcccatcagttgagtttgccaaatacttcagctgaaatggctgccattgagaagtttctgcagttttcagattctgttccgtgcaaaatccgtgccaaacggggctgtgccactcacccaagaagcattgcagagagggtaagaagaactaaaattagtgagcgtatgaggaaacttcaggatcttgtcccaaacatggacaagcaaactaacacagctgatatgttggacttggctgtggattacatcaaagaccttcaaaagcaagttcagacactttcagattgtcatgcaaagtgtacgtgttcacacgagaagcaacaataa

SEQ ID NO: 294 - protein, 265 aa, Glycine max
  G3768
MEQGSFSMGLRHSGNNSNLTRHSSSPAGLFSQINIENVYAGVRGMGSLGAVNNSIEDAKFSSSRRLKNQPNYSSSGRMSSIAEIGDKGYRESSPDSEAFADGNDFMAGYQVGHWDDTAMMSDNVGGLKRFSEEDSKPFSGLNAVETQNETGQTHAPLAHQLSLPNTSAEMAAIEKFLQFSDSVPCKIRAKRGCATHPRSIAERVRRTKISERMRKLQDLVPNMDKQTNTADMLDLAVDYIKDLQKQVQTLSDCHAKCTCSHEKQQ

SEQ ID NO: 295 - DNA, 948 bp, Glycine max
  G3769
atgaataatgaaccacttgttctccaacaacaacagcagcagcagcaacaacaacaacaaagtaataatatgtataattatggctcttctggtactcagaatttttaccaaagcactggacgaccacctttgccaaaccagatgaagactggtcatggaagtagttctaatcttatcagacatggtagctcacctgctggattgttttcaaacattaacattgatattactggctatgctgctgttgtaaggggcatgggaactatgggagctgctgctaataacaccagcgaggaagcaaacttttcaccagcaacaaggatgaagaataatgcaccaaacttctcttcaggactaatgtcatcaagggctgaagttggaaacaagagcaatacacagaacaataatgcagaaaatgaagggtttgctgaaagccagggcaatgagtttatccctgcaggtttccccgttggtccgtggaatgattctgcaatcatgtctgacaacgtgacaggtctgaagagatttagagatgaagatgtgaaaccattttctggtggtttaaatgcacctgaaagtcagaatgaaactggaggccaacaaccttcttcttctgctttggctcatcaattgagtttgccaaatacttctgcagaaatggcagccattgagaagtttctgcagctctcagattctgttccttgcaaaattcgtgccaaacggggctgtgccactcacccaagaagcattgcagagagggttagaagaactaaaattagtgagcgaatgaggaagctacaagatctcgttcccaacatggataagcaaacaaacacagctgacatgttggacttggctgttgagtacattaaagaccttcaaaaccaagttcagactctttcggacaatcgggcaaagtgtacgtgttcacacaagaagcagcaataa

SEQ ID NO: 296 - protein, 315 aa, Glycine max
  G3769
MNNEPLVLQQQQQQQQQQQQSNNMYNYGSSGTQNFYQSTGRPPLPNQMKTGHGSSSNLIRHGSSPAGLFSNINIDITGYAAVVRGMGTMGAAANNTSEEANFSPATRMKNNAPNFSSGLMSSRAEVGNKSNTQNNNAENEGFAESQGNEFIPAGFPVGPWNDSAIMSDNVTGLKRFRDEDVKPFSGGLNAPESQNETGGQQPSSSALAHQLSLPNTSAEMAAIEKFLQLSDSVPCKIRAKRGCATHPRSIAERVRRTKISERMRKLQDLVPNMDKQTNTADMLDLAVEYIKDLQNQVQTLSDNRAKCTCSHKKQQ

SEQ ID NO: 297 - DNA, 666 bp, Glycine max
  misc_feature (234)..(234): n is a, c, g, or t
  G3767
atggggactttgggggctgttaataacagtatcgaagatgcaaaattttctagttcgagaaggttgaagaatcaaccgaactattcttcgtcggggagaatgtcgtccaatgctgaaattggggacaaagggaatcgagaaagtagtccagacaatgaagcttttgctgatggtaacgattttatcaccggtttccaagttggtcattgggatgatgctgcaatcatgtctganaacgttggtggtctcaaaagatttagagaaaacgattcaaaaccattttctggcttaaatgcggctgagactcagaatgaaacaggacagactcatgctcctttggcccatcagttgagtttgccaaatacttcagctgaaatagctgccattgagaagtttctgcagttttcagattctgttccgtgcaaaatccgtgccaaacggggctgtgccactcacccaagaagcattgcagagagggttagaagaactaaaattagtgagcgtatgaggaaacttcaagatcttgtcccaaacatggacaagcaaactaacacagctgatatgttggacttggctgtggattacatcaaagaccttcaaaagcaagttcagacgctttcagattgtcatgcaaagtgtacgtgttcacacgagaagcaacaataa

SEQ ID NO: 298 - protein, 221 aa, Glycine max
  misc_feature (78)..(78): Xaa can be any naturally occurring amino acid
  G3767
MGTLGAVNNSIEDAKFSSSRRLKNQPNYSSSGRMSSNAEIGDKGNRESSPDNEAFADGNDFITGFQVGHWDDAAIMSXNVGGLKRFRENDSKPFSGLNAAETQNETGQTHAPLAHQLSLPNTSAEIAAIEKFLQFSDSVPCKIRAKRGCATHPRSIAERVRRTKISERMRKLQDLVPNMDKQTNTADMLDLAVDYIKDLQKQVQTLSDCHAKCTCSHEKQQ

SEQ ID NO: 299 - DNA, 450 bp, Oryza sativa (japonica cultivar-group)
  G3744
atgagctccgggtgggaggagtcgtcgctcatgtcggacacgaacatctccggcgtgaagcgccagcgcgactcgtcggagccgtcccagaacggcggcggcggcggcggcctggcgcaccagttcagcctgccgaagacctcgtcggagatggcggccatcgagaagttcctccagttccaggacgcggtgccctgcaagatccgcgccaagcgcggctgcgccacgcacccgcgcagcatcgccgagcgggtgaggaggacaaggatcagcgagcgaatcaggaagctgcaagaactcgtgccaaacatggacaagcaaaccaacactgctgacatgctggatttggctgttgactacatcaaggatcttcagaagcaggtcaagggattaaacgacagccgagctaactgcacctgctcagcgaagcatcagcagtactctggctag

SEQ ID NO: 300 - protein, 149 aa, Oryza sativa (japonica cultivar-group)
  G3744
MSSGWEESSLMSDTNISGVKRQRDSSEPSQNGGGGGGLAHQFSLPKTSSEMAAIEKFLQFQDAVPCKIRAKRGCATHPRSIAERVRRTRISERIRKLQELVPNMDKQTNTADMLDLAVDYIKDLQKQVKGLNDSRANCTCSAKHQQYSG

SEQ ID NO: 301 - DNA, 531 bp, Zea mays
  G3755
atgtcccagatctcagagatggacagcgaggaggtcggagggagcagcccagaggctgccggcggcggcagggggtacatccctgggtacccaatgggctctgggtgggaggactcgtcggctctcttgtcagacaatttgtctggcatcaaacgcccccgggactcgtcggagcctggccagagcggccttacgcaccagttcagcgtgcccaagacgtcgtccgagatggcaactattgagaaattcctccagttccaggacgccgtgccttgtaagatccgtgccaagcgggggtgcgccactcatccacgcagcatcgctgagagggtgaggagaacaaagatcagtgagcgaatccgaaagctgcaagaactcgttccaaatatggacaagcaaaccaacacatctgacatgctggatttggctgtcgactacatcaaggatctccagaagcaggttaaggtgctaaaggagagccaagataattgcacctgctcagcaagcaagaaccagcagcactcctgctga

SEQ ID NO: 302 - protein, 176 aa, Zea mays
  G3755
MSQISEMDSEEVGGSSPEAAGGGRGYIPGYPMGSGWEDSSALLSDNLSGIKRPRDSSEPGQSGLTHQFSVPKTSSEMATIEKFLQFQDAVPCKIRAKRGCATHPRSIAERVRRTKISERIRKLQELVPNMDKQTNTSDMLDLAVDYIKDLQKQVKVLKESQDNCTCSASKNQQHSC

SEQ ID NO: 303 - DNA, 351 bp, Glycine max
  G3766
atgttatcacatcacttgagtttaccaaaaacttcagcagagatgattactatggagaagttgcttcagttccctgattctgttccttgtaaaatcagagcaaagcgaggctgtgctactcatcctcgaagcattgctgaaagggtgagaagaactcggatcagtgaaagaatgaggaaattacaagagcttgtcccacacatggataagcaaaccaacacagcagacatgttggacttggctgttgaatacattaaagatcttcagaaacaattcaagactctaagtgaaaaaagggcaaactgcaagtgtataagcatgccaaaggcagatacaaatcaaattgcttga

SEQ ID NO: 304 - protein, 116 aa, Glycine max
  G3766
MLSHHLSLPKTSAEMITMEKLLQFPDSVPCKIRAKRGCATHPRSIAERVRRTRISERMRKLQELVPHMDKQTNTADMLDLAVEYIKDLQKQFKTLSEKRANCKCISMPKADTNQIA

SEQ ID NO: 305 - DNA, 1413 bp, Arabidopsis thaliana
  G592
aagctattaagatttggttttctacaaatttgttcttcctgaaacgtcacgagacagagcttacaagaagagaaaacagaggaaatttcgttgcattttttttacatattgattcgattaatggattcaaataatcatctctacgacccgaatcccaccgggtcgggtcttcttcgttttagatcagctccgagctctgttctcgccgcttttgttgacgacgacaagattggtttcgactccgataggttgctttcaagattcgtgacctctaatggcgttaacggagatctgggttcacctaaattcgaggataagtctccggtttcgttaacgaacacctctgtttcatacgccgccactctgccgccaccgccgcagcttgagccgtcgagttttctgggtttgccgccgcattacccgaggcagagtaaagggataatgaactcggttggtttggatcagtttctcggtatcaataatcatcacaccaaaccagttgaatctaatcttctccgtcaaagcagctctccagccggaatgtttactaatctctctgaccaaaacggttatggttcaatgaggaatttgatgaattacgaagaagatgaagagagtccatctaattccaatggattaagacgccattgcagtctctcttcaaggccaccttcttcacttggaatgctttctcaaatacctgaaatcgcacccgaaactaattttccatatagccattggaatgatccatccagctttattgataacttatcctcacttaaaagagaagccgaggacgatggaaaattgtttctcggagctcagaacggagagtccgggaatcgtatgcagttactgtcgcatcatttgagcctaccaaagtcatcatcgacagcctcggacatggtttcagtggataagtatcttcagctacaagattctgttccttgtaaaatcagagccaaacgtggttgcgctacacatcctcgaagcatcgctgaacgggtaagaagaacgcggataagcgagcgaatgaggaagttacaagagcttgttcctaacatggacaagcaaaccaacacttcggatatgttggatttagctgtggattacatcaaagatttacaaagacagtataagattttaaacgacaacagagctaactgtaagtgtatgaacaaggagaagaagtcaatatagggcgcaacaaagtgtgtagtagataggactaaaaagcagggagaaggacaagaaagaaacaatgtcatgtctgaatattttttagccgaaacagaccaaattgtctatgtaagctctcgagaaaagcatctgcttccaacaaaattctaagtaataaaatagtactcgatttgttcttatttcattattacaatgcagaatctactaatcaaa

SEQ ID NO: 306 - protein, 359 aa, Arabidopsis thaliana
  G592
MDSNNHLYDPNPTGSGLLRFRSAPSSVLAAFVDDDKIGFDSDRLLSRFVTSNGVNGDLGSPKFEDKSPVSLTNTSVSYAATLPPPPQLEPSSFLGLPPHYPRQSKGIMNSVGLDQFLGINNHHTKPVESNLLRQSSSPAGMFTNLSDQNGYGSMRNLMNYEEDEESPSNSNGLRRHCSLSSRPPSSLGMLSQIPEIAPETNFPYSHWNDPSSFIDNLSSLKREAEDDGKLFLGAQNGESGNRMQLLSHHLSLPKSSSTASDMVSVDKYLQLQDSVPCKIRAKRGCATHPRSIAERVRRTRISERMRKLQELVPNMDKQTNTSDMLDLAVDYIKDLQRQYKILNDNRANCKCMNKEKKSI

SEQ ID NO: 307 - DNA, 837 bp, Oryza sativa (japonica cultivar-group)
  G3742
atggcttccgccatggcgggactctaccgcaccgtcagctccggcggcacggagtccaccgccgccgccgccggcaacagcctcctccggcagagcagctcccccgccggcttcctcaaccatcttaccatggacaacggatacgggaatatgctaagagcgggcatgggcggcggcggcggtggcggcgacccgcggctcaaggggcagctcagcttctcgtcgcggcaggggtcggtgatgtcccagatctcggagatgggcagcgaggacgaggagctcgccggcggcggcggcagcccggaggctggcagcaacggcggtggcgccgcacgcggcggctacggcggcgggtacgcgatggggtcctccgcctgggaggagccctcgccgccggcgacgtcgctcctcccggacagcagcctcccgtccaagcgcccccgcgacgacctgccgcggcagctcagcctcccggcggcgtccaagaacagcagcaagcccccctcctccgcctccgccgccgcgtcgccggagatggccgccatcgagaagttcctccagttccaggacgccgtcccctgcaagatccgcgccaagcgcggctgcgccacccacccccgcagcatcgccgagcgggtgaggaggacgcggatcagcgagcggatacggaagctgcaggagctcgtccccaacatggaaaagcaaaccaacactgctgacatgttggatcttgccgtggactacatcaaggagctccagaagcaggtcaaggtgttaaacgacagccgttccagctgcacctgctcggcgagcaagcagaagcacttcgccggctaa

SEQ ID NO: 308 - protein, 278 aa, Oryza sativa (japonica cultivar-group)
  G3742
MASAMAGLYRTVSSGGTESTAAAAGNSLLRQSSSPAGFLNHLTMDNGYGNMLRAGMGGGGGGGDPRLKGQLSFSSRQGSVMSQISEMGSEDEELAGGGGSPEAGSNGGGAARGGYGGGYAMGSSAWEEPSPPATSLLPDSSLPSKRPRDDLPRQLSLPAASKNSSKPPSSASAAASPEMAAIEKFLQFQDAVPCKIRAKRGCATHPRSIAERVRRTRISERIRKLQELVPNMEKQTNTADMLDLAVDYIKELQKQVKVLNDSRSSCTCSASKQKHFAG

SEQ ID NO: 309 - DNA, 1164 bp, Oryza sativa (japonica cultivar-group)
  G3746
atgaacaggatgacggcgccgcacggggggatgccgccgccgccgatgccggcggcgggggggctggcgaggtacggctcggcgccggggtcgctgctggcgtcgatcgccgactcggtgatccggggccgcggggttggggttgtcgatcagctgcatcatcatcagcatcagcatcagcttccgccgccgccgccgccgcagcagcagcagatggtggggaggtacttctccgcggagtcgtcggggctcacctcctgcgagtccagctgccggacgacgacgacgacgtccacagcggcggcggccgatgtcgggcggcacccgctcgagcgcgcgtacggcggctccggcgagatccacgtcgacgcctcctccgccgccgtcccgctcttccgccacagcagctcccccgccggcctcctctcccgcctcatggctgacccgcacggcaatggcatggccgcgacgagagggatgggcggctactccggcggcggcggcgacgccggcgcgatggcgcacaggaggctgagctcgcagtggagcttctcgcggcaggacctgccgcagatatcggagatgggcggcctcatccccgacatcggggagagcatcgtcaccggcggcggcggcaacagctccagcgatggcgccggccacggcgcgcagtcctcctccttcctctcctccaggaacttctccatgagctcctgggacgacaccaactccatcatgttctcgcccccgagcagcagcaagaaggcccgcgtcgccgccgccgccgccggcgaccacggcgacgacatggtctccagcttcagcaacatcgactcccagtttggcttgtcgaagcagtcgtcgctggagatggccggcatggatgacttcttgcagctccagccagactccgtcgcctgcagggcccgggcaaagcgcggctgcgcgacgcacccgcggagcatcgctgagagggagaggagaacgaggattagcaagaggctgaagaagctgcaggatctcgtgccgaacatggacaagcaaacgaatacatcagacatgttggatattgctgtaacctacatcaaggagcttcagggccaagttgagaagctaaaacatgaccaagcaaactgcacttgctcaggcaagcacgattgctga

SEQ ID NO: 310 - protein, 387 aa, Oryza sativa (japonica cultivar-group)
  G3746
MNRMTAPHGGMPPPPMPAAGGLARYGSAPGSLLASIADSVIRGRGVGVVDQLHHHQHQHQLPPPPPPQQQQMVGRYFSAESSGLTSCESSCRTTTTTSTAAAADVGRHPLERAYGGSGEIHVDASSAAVPLFRHSSSPAGLLSRLMADPHGNGMAATRGMGGYSGGGGDAGAMAHRRLSSQWSFSRQDLPQISEMGGLIPDIGESIVTGGGGNSSSDGAGHGAQSSSFLSSRNFSMSSWDDTNSIMFSPPSSSKKARVAAAAAGDHGDDMVSSFSNIDSQFGLSKQSSLEMAGMDDFLQLQPDSVACRARAKRGCATHPRSIAERERRTRISKRLKKLQDLVPNMDKQTNTSDMLDIAVTYIKELQGQVEKLKHDQANCTCSGKHDC

SEQ ID NO: 311 - DNA, 474 bp, Glycine max
  G3771
atgcaacccacatccggcggcggcgggctggcaaggttccgttcagctccggcgagctggttagaatcagttctgttgaaggaagaggaagaagaagaagaccccttaagcttcactcaactgctttccactatcgatgatgctccctctcattctcaacaccaactctatggtgccgctctctcaaacaaggataaaacacctgaaatcttcatgttagaagattccgttccttgcagagtgagggctaagcgtggctgtgctactcatcccaggagtattgctgaaagggttcgcaggactcgtatcagtgaccgcatcagaaagctgcaagaacttgtgccaaacatggataagcaaacaaatactgcagatatgttagatgaggctgtagcgtatgtcaagtttctacaaaagcaaattgaggaactgtcagagcaccaacggaggtgtaaatgcgtggttcaagagtaa

SEQ ID NO: 312 - protein, 157 aa, Glycine max
  G3771
MQPTSGGGGLARFRSAPASWLESVLLKEEEEEEDPLSFTQLLSTIDDAPSHSQHQLYGAALSNKDKTPEIFMLEDSVPCRVRAKRGCATHPRSIAERVRRTRISDRIRKLQELVPNMDKQTNTADMLDEAVAYVKFLQKQIEELSEHQRRCKCVVQE

SEQ ID NO: 313 - DNA, 687 bp, Glycine max
  G3765
atgaaaggtgttggaaactatagtggggtcaatggcaatgatggtgaacttagtctatctatgaacagaatgaagaatcacattagcttctcatcaataagtccttcttcttccttgggaatgctatcaccaacctccaaaatgggcacggagggtattagggtaactagacctgaggatgggagacagggaagttgcaatggtgatgctcgatattatggtcctggattcccttatgcttcttggaatgagccctcacaccccaaaagacagcgaagtagtaatgatgagttactttttgattctcagaatggagagccaggaaatcaagttcaaaggctttcgcatcatttgagtttgccaagaacgtcgtcggagatgtttgctatggataatttgcttcagttctcagattctgttccttgtaaaatcagagcaaagagaggctttgctactcatcctcgaagcattgccgaaagggtgagaagaacaaggatcagtgaacgaataagaaaattgcaagagcttgttccaaccatggacaagcaaactagcacagcagagatgttggacttggctttagactacataaaagatcttcagaaacaattcaagactctgagcgataaacgggctaaatgcaaatgtataaacatgcagaagtcagaagcagatcgagttgcttga

SEQ ID NO: 314 - protein, 228 aa, Glycine max
  G3765
MKGVGNYSGVNGNDGELSLSMNRMKNHISFSSISPSSSLGMLSPTSKMGTEGIRVTRPEDGRQGSCNGDARYYGPGFPYASWNEPSHPKRQRSSNDELLFDSQNGEPGNQVQRLSHHLSLPRTSSEMFAMDNLLQFSDSVPCKIRAKRGFATHPRSIAERVRRTRISERIRKLQELVPTMDKQTSTAEMLDLALDYIKDLQKQFKTLSDKRAKCKCINMQKSEADRVA

SEQ ID NO: 315 - DNA, 1064 bp, Arabidopsis thaliana
  G1134
taaagaaagagaaaaaaagctttcgtagtgtctattgaaaccagagaaaagccaaaggggatgcaaccaacatccgtcggtagtagcggcggtggtgacgacggaggaggcagaggaggaggaggagggctaagtagaagtggactatctcggatccgttcagctccagcgacttggcttgaagctttacttgaggaagatgaagaagagtctttgaaacctaatcttggtctcaccgatttgcttaccgggaactcgaacgatttaccgacaagtcgcggctcgttcgagttcccgattcctgttgagcaagggttgtatcaacaaggtgggtttcaccgacagaatagtactccggcggattttcttagtggttctgatggatttatccaaagctttgggattcaggcgaattacgattacttatcggggaatatcgatgtttctccgggaagtaagcggtctagagaaatggaagcactcttctcttctcctgagtttacttctcaaatgaaaggagagcaaagcagcggtcaagttcctaccggagtatcaagcatgtcggatatgaacatggagaaccttatggaggactctgttgcttttagggttcgggctaaacgtggttgcgcaactcatccccgcagcattgccgagagggtacgaaggacgcggattagtgatcggataaggaagctacaagagcttgtacctaacatggacaagcaaaccaacactgcagacatgttagaagaagcagtagaatacgtgaaagttcttcaaaggcagatccaggagttaacagaagaacagaagaggtgcacatgcatacctaaggaagaacaataaggtttgctcctgatttgttttatatttgcttaacggcaatgatctgatcgaaaaattcgaaagatgatcttagcttgaatttagatggatgtcatgttgaaaagtatattatttgataaatggatgtaggtgtaatataaaatttttgtacaataatgaagaaagttaaaaagaattaatgaaaacatatattctttatgatataaaaaaaaaaa

SEQ ID NO: 316 - protein, 262 aa, Arabidopsis thaliana
  G1134
MQPTSVGSSGGGDDGGGRGGGGGLSRSGLSRIRSAPATWLEALLEEDEEESLKPNLGLTDLLTGNSNDLPTSRGSFEFPIPVEQGLYQQGGFHRQNSTPADFLSGSDGFIQSFGIQANYDYLSGNIDVSPGSKRSREMEALFSSPEFTSQMKGEQSSGQVPTGVSSMSDMNMENLMEDSVAFRVRAKRGCATHPRSIAERVRRTRISDRIRKLQELVPNMDKQTNTADMLEEAVEYVKVLQRQIQELTEEQKRCTCIPKEEQ

SEQ ID NO: 317 - DNA, 1167 bp, Arabidopsis thaliana
  G2555
ctgtttttgtatccgtgtaaattaatcacacggtagtttttgatgaaaagacaacaatcggagaacaatctggtctgctgctaaaatttaataaattgttttgtctaattgtctccacccataaaaaagcgcgaattcaattcaccgactaaagacattctccggtggagaccccgatgcaatccactcatataagcggcggaagtagcggtggtggtggtggaggaggaggagaggtgagtcgaagtggattatctcggatccgttcagctccagctacttggattgaaaccctactcgaagaagatgaagaagaaggtttaaaacctaacctttgtttaacagagctgcttactggtaataataactctggaggagtgataacgagtcgtgacgactcgttcgagttcctgagttctgttgagcaaggattgtataatcatcatcaaggtggtggctttcaccgtcagaatagttctccggctgattttcttagtgggtctggttctgggactgatgggtatttctctaattttggtattccggcgaattatgactatttgtcgaccaacgttgatatttctccgactaaacggtctagagatatggaaacacagttttcttctcagctgaaagaagagcaaatgagtggtgggatatcaggaatgatggatatgaacatggacaagatttttgaggattcagttccttgtagggttcgtgctaaacgtggttgtgctactcatcctcgtagcattgctgaacgggtgagaagaacgcgaataagtgatcggattaggaggctgcaagagcttgttcctaacatggataagcaaaccaacactgcagacatgttggaagaagctgtggagtatgtgaaggctcttcaaagccagatccaggaattgacagagcagcagaagagatgcaaatgcaaacctaaagaagaacaataatgtatcctttaggatttgatatatctgtattttatttttgtactatctaaaaatggtgatgatctgttcgaaaattcgaaacatgatcttatatattgaactagaaaaaatagatatatatgaattttagctgtaaaatttttgtacaataaggagaaaaagatttagaagagtcaataaaaagatgatgtttacaagtcaaaaaaaaaaa

SEQ ID NO: 318 - protein, 259 aa, Arabidopsis thaliana
  G2555
MQSTHISGGSSGGGGGGGGEVSRSGLSRIRSAPATWIETLLEEDEEEGLKPNLCLTELLTGNNNSGGVITSRDDSFEFLSSVEQGLYNHHQGGGFHRQNSSPADFLSGSGSGTDGYFSNFGIPANYDYLSTNVDISPTKRSRDMETQFSSQLKEEQMSGGISGMMDMNMDKIFEDSVPCRVRAKRGCATHPRSIAERVRRTRISDRIRRLQELVPNMDKQTNTADMLEEAVEYVKALQSQIQELTEQQKRCKCKPKEEQ

SEQ ID NO: 319 - DNA, 1353 bp, Arabidopsis thaliana
  G2149
aatcttttatttttcttttagaaaccaaacttttcagatttctctctctccatttggcgatagaagaagtcatgtaccaatcatcatcctccacgtcatcatcatcgcagagatcatcgcttcccggcggcggaggactgatccgttacggctcagctccgggatcgtttctaaactctgtggttgacgaagtcatcggaggaggctcatcaaacgctcgtgacttcaccggctatcaaccgtcgtcggataacttcatcggtaactttttcaccggagctgctgactcatcctcgctgagatccgattcgacgacttgtggagtcaacaactcatccgacggacagaaacagctaggcaataacaataataataatagtaataaagatatcttcctcgacagatcctacggtggattcaacgagatctcgcaacaacacaagagcaacgacatcggaggaggaaacagctcaggatcttactctctcgctagacaacgtagctctcccgccgatttcttcacctacctcgcctcagataaaaacaatttctcgttgaaccaaccaaccagtgattatagtccgcaaggagggtctaatgggggacgaggacattccagattgaagtctcagctaagcttcacgaatcacgactctctggctcggatcaacgaggtcaatgagaccccagtccacgacggttcaggccattcgttttctgcggctagctttggtgcagccactactgattcttgggatgacggttccggttcgatagggtttaccgtgactaggcccagtaaacgatccaaggacatggactctggtctcttttcgcagtatagtcttccttcagacacttcaatgaactacatggataacttcatgcagcttccagaagattctgtaccctgcaaaatccgggccaaacgcggctgcgccacccatcctagaagcatcgctgagcgggagaggagaacgagaataagtgggaagctaaagaagctacaagatcttgtccccaacatggataagcaaacaagctattcagacatgctggatttagctgtacaacacatcaaaggccttcagcatcaacttcagaatttgaaaaaagatcaagagaattgcacgtgtgggtgcagtgagaaaccaagctagctcaaacccaaaggtagggtcatcctaattttatttgcattgttccgattttatcatatgagagaattagagaagatgtaaataaaatagattatattaaatgtctaatcctcttataattaagctcctcattcgttatcattataagatagaacagtgacaattgtccattatgtttttgtttcaagtttat

SEQ ID NO: 320 - protein, 362 aa, Arabidopsis thaliana
  G2149
MYQSSSSTSSSSQRSSLPGGGGLIRYGSAPGSFLNSVVDEVIGGGSSNARDFTGYQPSSDNFIGNFFTGAADSSSLRSDSTTCGVNNSSDGQKQLGNNNNNNSNKDIFLDRSYGGFNEISQQHKSNDIGGGNSSGSYSLARQRSSPADFFTYLASDKNNFSLNQPTSDYSPQGGSNGGRGHSRLKSQLSFTNHDSLARINEVNETPVHDGSGHSFSAASFGAATTDSWDDGSGSIGFTVTRPSKRSKDMDSGLFSQYSLPSDTSMNYMDNFMQLPEDSVPCKIRAKRGCATHPRSIAERERRTRISGKLKKLQDLVPNMDKQTSYSDMLDLAVQHIKGLQHQLQNLKKDQENCTCGCSEKPS

SEQ ID NO: 321 - DNA, 1304 bp, Arabidopsis thaliana
  G2766
ctttctctcaaaccctctcctcaagattttttcctaagcatcagattagcttttgtagggtttttcttttccggtttcatgtaccctcctaattcctctaagtccaccgctcatgacggcggcggcgatgccgacaccaatcaatatgactcagccgctggagctacccgtgatttctcctctcttggccctcaaacccaccatcatccgccaccgcagcggcagcagcagcatcagcagaatcccaacctcgtcggccattatttaccgggcgagccatcttccatcggattcgattccaacgcttcttcttcgtcttctttgttccgacacagaagctctccggctggattctacgaccaacatcttcccactgatcccaacggtttttctctaggacggccaaacggaggctacggcggaggaggagagcaagggccgtcgaggttgaagtcggagctgagattctctagtgggagtagtagccatcaagaacataattctctaccgcgaatctcggaggttgaagcggctgcagcggctagaaacggtgtcgcatcaagtagtatgagttttggaaataatcgtactaacaattgggacaactcgtcttctcatatcagtttcaccattgatcaacccggaaaacggtccaagaactccgactttttcaccttagaaactcagtatagcatgccgcaaacaactctggaaatggcgacaatggagaacttgatgaacatcccagaggactcggtgccttgtagggctagagccaagcgcggcttcgcgactcacccacgcagcattgctgaaagggagagaagaacgaggataagcgggaagctgaagaagctacaagaacttgtgcctaatatggacaagcaaacgagctacgcagatatgttggatttggctgttgagcatatcaaaggtcttcagcaccaagtagagtcactggaaaagggaatggagagatgtacttgtggggcatgcaagaagcgatgatgaatgatattgttccaagtatgatgcaataaagtatagaagaaaaggagatcacttacgaaccaaattctaagacagaaagaaacatagcaaaaaggagttattttggaggtctaaagaaagtgatgatggattaatgaaggctggttttgttactctctgaaagtcttgacctttattataacttaaaattcgatcaatcgattttttttttcctgttttcctcaaagttggttaattttagcttagagcaaaacccattatttgagattgaaagagatgcgcgtttgtgtgtg

SEQ ID NO: 322 - protein, 309 aa, Arabidopsis thaliana
  G2766
MYPPNSSKSTAHDGGGDADTNQYDSAAGATRDFSSLGPQTHHHPPPQRQQQHQQNPNLVGHYLPGEPSSIGFDSNASSSSSLFRHRSSPAGFYDQHLPTDPNGFSLGRPNGGYGGGGEQGPSRLKSELRFSSGSSSHQEHNSLPRISEVEAAAAARNGVASSSMSFGNNRTNNWDNSSSHISFTIDQPGKRSKNSDFFTLETQYSMPQTTLEMATMENLMNIPEDSVPCRARAKRGFATHPRSIAERERRTRISGKLKKLQELVPNMDKQTSYADMLDLAVEHIKGLQHQVESLEKGMERCTCGACKKR

SEQ ID NO: 323 - DNA, 1011 bp, Zea mays
  G3760
atgcagcccactacgcgggaaatgcaggccatggccgccgccggccagcagatctccctcgacgacctccgcgcggcagcaggcggcgtgcacgacgacttcctggaccagatgctcggaggcctgccgccgtcggcatggccggagctgtcgtccgcggcgggagggaaggcgccggatggcggcgcgcaggcggagcagatgcagcaccagccgcagcacttgggtgggggtgggggcctgtacgacgactccgccttgctggcgtcgcggctccggcagcaccaaatcagcggcggcggcggcggggaggccgtgaagcagatggtgctgcagcagctggccgatctgaggcaggaacaccatgtgttgctgcagggcatgggccgctcgacctcgacgggcggcagcagagacggcggcctgctcctcccgctctctctcggcagtggcggatcgggcggcgacgtgcaggcgctactcaaagctgtagccgactccgccggaggagaagccgcaggcgtcttcggcggttccttcgccggatcgctccaccaccaccagcagcagcagcagcattttcaatcacatccgcagcagcaaacggcgccgttgccggggcagggcttcggtggaggcgcgggcgcgtccggcggcgtgtcgcagccgcaggccggcgctgcgtgcggaggcgccgccgcgccgcccaggcagcgggtacgggctcggcgcggccaggccaccgacccccacagcatcgcggagcggctccggagagagaggatcgcggagaggatgaaggcgcttcaggagctggtgcccaacgccaacaagacggacaaggcgtcgatgctggacgagatcgtcgactacgtcaagttccttcagctccaagtcaaggtgctgagcatgagccggctaggtggtgccgccttccttttgtggaccgtgcgtgtgtgtgttgtgctcggggggtcgaggcggcgtggcggtcgcggccgggagcgatga

SEQ ID NO: 324 - protein, 336 aa, Zea mays
  G3760
MQPTTREMQAMAAAGQQISLDDLRAAAGGVHDDFLDQMLGGLPPSAWPELSSAAGGKAPDGGAQAEQMQHQPQHLGGGGGLYDDSALLASRLRQHQISGGGGGEAVKQMVLQQLADLRQEHHVLLQGMGRSTSTGGSRDGGLLLPLSLGSGGSGGDVQALLKAVADSAGGEAAGVFGGSFAGSLHHHQQQQQHFQSHPQQQTAPLPGQGFGGGAGASGGVSQPQAGAACGGAAAPPRQRVRARRGQATDPHSIAERLRRERIAERMKALQELVPNANKTDKASMLDEIVDYVKFLQLQVKVLSMSRLGGAAFLLWTVRVCVVLGGSRRRGGRGRER

SEQ ID NO: 325 - DNA, 885 bp, Oryza sativa (japonica cultivar-group)
  G3750
atggccgggcagcagccgcagcagcagggcccaccggaggacgactttttcgaccagttcttctccctgaccagctccttccctggcgccgcgccgggcggccgcgccgccggtgaccagcccttctccctcgcgctcagcctcgacgccgccgcggcggccgaggcgtccgggagcgggaagaggctcggggtcggcgatgacgccgagggtggcggcagcaaggcggatcgggagaccgtgcagctcaccggactcttcccgccggtgttcggcggcggcggcgtgcagccgccgaacctccgccccaccccgcctacccaggtgttccacccgcagcagtcgaagcagggcggagcagccgtcgggccgcagccgccggcgccgaggccgaaggtgcgagcgcggcgtgggcaggcgaccgacccccacagcatcgcggagaggctaagaagagagagaatagcagaaaggatgagggccctacaggaattggtccccaatacaaacaagacagatagggcagctatgctagatgagatccttgattatgtgaaattcctgaggctgcaagtaaaggttttaagcattagcaggctgggtggcgcgggtgctgttgcacagctggttgctgatattccactttcagttaagggggaagcaagcgatagtgggggcaaccaacagatttgggaaaagtggtcaacggatggcacagaaagacaggtagcgaagctgatggaagaagacatcggggcagcgatgcaatttctccaatccaaagcactctgcatgatgccaatctcgctcgccatggcaatctatgacacacaacaaacacaggatggacaaccagtgaagcacgaacccaacactccttcctag

SEQ ID NO: 326 - protein, 294 aa, Oryza sativa (japonica cultivar-group)
  G3750
MAGQQPQQQGPPEDDFFDQFFSLTSSFPGAAPGGRAAGDQPFSLALSLDAAAAAEASGSGKRLGVGDDAEGGGSKADRETVQLTGLFPPVFGGGGVQPPNLRPTPPTQVFHPQQSKQGGAAVGPQPPAPRPKVRARRGQATDPHSIAERLRRERIAERMRALQELVPNTNKTDRAAMLDEILDYVKFLRLQVKVLSISRLGGAGAVAQLVADIPLSVKGEASDSGGNQQIWEKWSTDGTERQVAKLMEEDIGAAMQFLQSKALCMMPISLAMAIYDTQQTQDGQPVKHEPNTPS

SEQ ID NO: 327 - DNA, 1449 bp, Arabidopsis thaliana
  G922
atggtggctatgtttcaagaagataatggaacatcttctgtagcttcatcaccacttcaagtcttctcaactatgtcactcaacagaccgactctcctcgcttcttcatctccgtttcattgtctcaaagatctcaaaccagaggagcgtggtctctacttaatccacctcttgctaacttgtgccaaccacgtggcttcaggtagcctccaaaacgctaacgcagcgctcgagcagctctctcacctcgcttctcctgacggcgacacgatgcagcgaatcgctgcttacttcaccgaagcgcttgctaacagaatccttaagtcctggcctggtctttacaaggctcttaacgcaactcagacaagaactaacaatgtctctgaggagattcatgttagaagactcttctttgagatgttcccgatactcaaagtctcttacttgctcactaatcgagctatactcgaggctatggaaggagagaagatggttcatgtgattgatctcgatgcttctgagccagctcaatggcttgctttgcttcaagcttttaactctaggcctgaaggtccacctcatttgagaatcactggtgttcatcaccagaaggaagtgcttgaacaaatggctcatagactcattgaggaagcagagaaactcgatatcccgtttcagtttaatcccgttgtgagtaggttagactgtttaaatgtagaacagttgcgggttaaaacaggagaggccttagccgttagctcggttcttcaattgcataccttcttggcctctgatgatgatctcatgagaaagaactgcgctttacggtttcagaacaaccctagtggagttgacttgcagagagttctaatgatgagccatggctctgcagctgaggcacgtgagaatgatatgagtaacaacaatgggtatagccctagcggtgactcggcctcatctttgcctttaccaagttcaggaaggactgatagcttcctcaatgctatttggggtttgtctccaaaggtcatggtggtcactgagcaagactcagaccacaacggctccacactaatggagaggctattagaatcactttacacctacgcagcattgtttgattgcttggaaacaaaagttccaagaacgtctcaagataggatcaaagtggagaagatgctcttcggggaggagatcaagaacatcatatcctgcgagggatttgagagaagagaaagacacgagaagcttgagaaatggagccagaggatcgatttggctggttttgggaatgttcctcttagctattatgcgatgttgcaggctaggagattgcttcaagggtgcggttttgatgggtatagaatcaaggaagagagcgggtgcgcagtaatttgctggcaagatcgacctctatactcggtatcagcttggagatgcaggaagtga

SEQ ID NO: 328 - protein, 482 aa, Arabidopsis thaliana
  G922
MVAMFQEDNGTSSVASSPLQVFSTMSLNRPTLLASSSPFHCLKDLKPEERGLYLIHLLLTCANHVASGSLQNANAALEQLSHLASPDGDTMQRIAAYFTEALANRILKSWPGLYKALNATQTRTNNVSEEIHVRRLFFEMFPILKVSYLLTNRAILEAMEGEKMVHVIDLDASEPAQWLALLQAFNSRPEGPPHLRITGVHHQKEVLEQMAHRLIEEAEKLDIPFQFNPVVSRLDCLNVEQLRVKTGEALAVSSVLQLHTFLASDDDLMRKNCALRFQNNPSGVDLQRVLMMSHGSAAEARENDMSNNNGYSPSGDSASSLPLPSSGRTDSFLNAIWGLSPKVMVVTEQDSDHNGSTLMERLLESLYTYAALFDCLETKVPRTSQDRIKVEKMLFGEEIKNIISCEGFERRERHEKLEKWSQRIDLAGFGNVPLSYYAMLQARRLLQGCGFDGYRIKEESGCAVICWQDRPLYSVSAWRCRK

SEQ ID NO: 329 - DNA, 1029 bp, Arabidopsis thaliana
  G2053
atggagaatccggtgggtttaagattccgtccgaccgacaaggagatcgtcgtcgattacctccgaccaaaaaactccgatagggacacgagtcatgttgatcgagtcattagcacagtcactatccgtagcttcgacccttgggagttaccttgccagtctaggatcaaactgaaagatgagtcttggtgtttcttcagccctaaggagaacaaatatggcagaggtgatcaacaaattagaaaaacgaaatctggttactggaagattactggcaaaccaaagcctatcttgcgtaaccgccaagagatcggtgagaaaaaggttttgatgttttacatgagtaaggaacttggtggatccaaatccgactgggttatgcacgagtaccatgctttctctcctactcagatgatgatgacatatacaatatgtaaagttatgtttaagggtgacgtgagagagatttcttcttcttctgcttcttatggtagtgaaattgagcagagtcgtgactctttaatccctcttcttgtgaacgattctgaggaagaagctcaaatcgaggatgctataccaatagaggaatgggaaacatggttgactgatgatggtgttgatgagcaggtgaatcatattatgaatatgaaagatgatcgcaacaaccacaggcctcaaaagccattgactggtgtcttgattgacgatagtagtgatgatgatgatgattctgatttgctatctccaacaacaaattctattgaaaattcgagcacttgtgatagttttggtagctcagaccaaatcaacttagtgtcactaactcaagaggtgagccaagctctgataaccagtattgatacacccgagaagattaagagtccttatgatgatgcacaagggactggggctggagggcaaaaattgggtcaagagactcgagagaagaaacgagctggtttctttcacaggatgatacaaatattcgtcaagaaaattcaccaatgttcttctatctcaagaacataa

SEQ ID NO: 330 - protein, 342 aa, Arabidopsis thaliana
  G2053
MENPVGLRFRPTDKEIVVDYLRPKNSDRDTSHVDRVISTVTIRSFDPWELPCQSRIKLKDESWCFFSPKENKYGRGDQQIRKTKSGYWKITGKPKPILRNRQEIGEKKVLMFYMSKELGGSKSDWVMHEYHAFSPTQMMMTYTICKVMFKGDVREISSSSASYGSEIEQSRDSLIPLLVNDSEEEAQIEDAIPIEEWETWLTDDGVDEQVNHIMNMKDDRNNHRPQKPLTGVLIDDSSDDDDDSDLLSPTTNSIENSSTCDSFGSSDQINLVSLTQEVSQALITSIDTPEKIKSPYDDAQGTGAGGQKLGQETREKKRAGFFHRMIQIFVKKIHQCSSISRT

SEQ ID NO: 331 - DNA, 1462 bp, Arabidopsis thaliana
  G515
caaccatggcgaaagctctccaatgcatatttttttgatcttttccttttcccttcttttttgatcgctgcagagaaatggaaactcctgtgggtttaagattctgtccgaccgacgaggagatcgtcgtcgattacctttggccgaaaaattccgatagagacacgagccatgtcgatcgattcattaacacagtccctgtctgtagactcgatccttgggagttaccttgccagtcaaggatcaaactgaaagatgtggcttggtgtttcttcagacctaaggagaacaaatatggcagaggtgatcagcagatgagaaaaacgaaatctgggttttggaagagtactggcagaccaaagcctatcatgcgtaatcgccaacagatcggtgagaaaaagattttgatgttttacacgagtaaggaatccaaatccgattgggttatacacgagtaccacggtttctctcataaccagatgatgatgacatacacactctgtaaagttatgtttaatggtggcatgagagagaagtcttcctcttctccttcttcttctggtgttagtggaattgagcagagtcgtcgtgactctttaatccctcagcttgtcaacaattctgagggatcctcacttcacagagaagatccaagtcagtttggtgatgtgctgcaagaagctccaatcgaggatgctaaactgaccgaggaattggtaaaatggctgatgaatgatgaggatgatgctcaaatcgaggatgctataccgattgaggaatgggaaacatggttgaatgatattgatgatgctaaggagaagagtatcatgtttatgcatgataatcgaagtgattacagacctccaaactcattaactggtgtcttcagtgatgatgttagcagtgatgataatgattctgatttgctaactccaaaaacaaactctattcaaacttcgagcacttgtgatagttttggtagctcaaatcatcgcatagaccagatcaaagacctgcaagaatctcctacctcaacaatcaacttagtgtcactaactcaagaggtgagccaagctctaataaccagtattgataccgccgagaagaagaagaatccttatgatgatgcacaagggactgagattggtgagcataaattgggtcaagagacgatcaagaagaaaagagctggtttctttcacaggatgatacaaaaattcgtcaagaaaattcacctatgttcttccatctcaagaacttgataacaataaaagtgatcaataacaccttttctactttccaaattatttacaacagtacaagtgtatgctatgatgtctatcttggtttgtaactttaccatactgtatgtgtgatatgtataaaactggtaaatttgtgaagacaaatttgtatccattgacataataatgtctatcttgttttgttaaaaaaaaaaaaa

SEQ ID NO: 332 - protein, 394 aa, Arabidopsis thaliana
  G515
METPVGLRFCPTDEEIVVDYLWPKNSDRDTSHVDRFINTVPVCRLDPWELPCQSRIKLKDVAWCFFRPKENKYGRGDQQMRKTKSGFWKSTGRPKPIMRNRQQIGEKKILMFYTSKESKSDWVIHEYHGFSHNQMMMTYTLCKVMFNGGMREKSSSSPSSSGVSGIEQSRRDSLIPQLVNNSEGSSLHREDPSQFGDVLQEAPIEDAKLTEELVKWLMNDEDDAQIEDAIPIEEWETWLNDIDDAKEKSIMFMHDNRSDYRPPNSLTGVFSDDVSSDDNDSDLLTPKTNSIQTSSTCDSFGSSNHRIDQIKDLQESPTSTINLVSLTQEVSQALITSIDTAEKKKNPYDDAQGTEIGEHKLGQETIKKKRAGFFHRMIQKFVKKIHLCSSISRT

SEQ ID NO: 333 - DNA, 1053 bp, Arabidopsis thaliana
  G516
atggcgaatccggtgggttttagattccgtccgactgacggggagatcgtcgacatttacctccgaccgaaaaatctcgaaagtaacacgagccatgtcgatgaagtcattagcacagttgatatttgtagcttcgacccttgggacttaccttcccattctaggatgaaaacaagagatcaggtttggtatttcttcggccgtaaggagaacaaatatggtaaaggtgatcgacagataagaaaaaccaagtctggtttttggaagaaaactggcgttaccatggatataatgcgcaaaacgggagatcgtgagaagatcggtgagaaaagggttttggtgtttaagaatcacggtggttccaagtccgattgggctatgcatgagtatcacgctacgttctcgtctcctaatcagggtgaaaggagagaattttcagttgctactggtagtggaattaagcatactcactctttaatccctcctaccaacaattctggagttttgagtgtagagacagagggatcgttgtttcacagccaagaatcacagaatccaagtcagttttctggctttcttgatgtggatgcactagatagggacttctgcaatattttgagtgatgatttcaaaggcttctttaatgatgacgatgagcagagtaagattgtttctatgcaagatgatcgcaacaaccacacacctcaaaagccattgaccggtgtcttcagtgatcatagcaccgatggtagtgattctgatccgatttctgcaacaactatttccattcaaactttaagcacttgtcctagttttggtagctcaaatcctctataccaaatcactgacttgcaggaatctcctaactcaatcaagttagtgtcattagctcaagaggtgagcaaaacaccgggaaccggtattgataatgatgcacaagggactgagattggtgagcataaattgggtcaagagacgatcaagaacaaaagagctggtttctttcacaggatgatacaaaaattcgtcaagaaaattcacctaagaacatga

SEQ ID NO: 334 - protein, 350 aa, Arabidopsis thaliana
  G516
MANPVGFRFRPTDGEIVDIYLRPKNLESNTSHVDEVISTVDICSFDPWDLPSHSRMKTRDQVWYFFGRKENKYGKGDRQIRKTKSGFWKKTGVTMDIMRKTGDREKIGEKRVLVFKNHGGSKSDWAMHEYHATFSSPNQGERREFSVATGSGIKHTHSLIPPTNNSGVLSVETEGSLFHSQESQNPSQFSGFLDVDALDRDFCNILSDDFKGFFNDDDEQSKIVSMQDDRNNHTPQKPLTGVFSDHSTDGSDSDPISATTISIQTLSTCPSFGSSNPLYQITDLQESPNSIKLVSLAQEVSKTPGTGIDNDAQGTEIGEHKLGQETIKNKRAGFFHRMIQKFVKKIHLRT

SEQ ID NO: 335 - DNA, 1080 bp, Arabidopsis thaliana
  G517
atgatgaatccggtgggtttcagattccgtccaaacgacgaggagatcgtcgaccattacctccggccaaaaaatctcgatagtgacactagccatgtcgatgaagtcattagcacagtcgatatctgtagcttcgagccttgggatttaccttccaagtcgatgatcaaatcgagagatggggtttggtatttctttagtgttaaggagatgaagtataacagaggtgatcaacagagaagaagaacaaactctgggttttggaagaaaactggaaaaacaatgactgtcatgcgcaaaagaggaaatcgtgagaagatcggtgagaaaagggttttggtttttaagaatcgagatggttcaaagaccgactgggttatgcacgagtatcacgctacgtccttgtttcctaatcagatgatgacgtatacagtctgcaaagttgagtttaagggtgaagagacagagatctcttcttcttctactggtagtgaaattgaacagattcactctttaatccctcttgtgaacagttctggaggatctgagggttcgtcgtttcacagccaagaattacagaattcaagtcagtctggtgtctttgctaatgtgcagggagaatctcaaatcgatgatgcaactacaccgattgaggaggaatggaaaacatggttgaataatgatggtgatgagcagaggaatatcatgtttatgcaagatcatcgcagcgattacacacctctaaagtcgttaactggtgtcttcagtgatgatagcagtgatgataatgattctgatttgatatctcctaaaacaaattctattggaacttcgagcacttgtgctagttttgctagctcaaatcatcagatagaccaaactcaacattctcctgactcaacagtccagctagtgtcattaactcaagaggtgagccaaggtccgggtcaagtgactgtgattcgagagcataaattgggtgaagagtctgtcaagaagaaaagagctagtttcgtttacaggatgatacacagattagtcaagaaaattcaccaatgttattctatctcaagaacatga

SEQ ID NO: 336 - protein, 359 aa, Arabidopsis thaliana
  G517
MMNPVGFRFRPNDEEIVDHYLRPKNLDSDTSHVDEVISTVDICSFEPWDLPSKSMIKSRDGVWYFFSVKEMKYNRGDQQRRRTNSGFWKKTGKTMTVMRKRGNREKIGEKRVLVFKNRDGSKTDWVMHEYHATSLFPNQMMTYTVCKVEFKGEETEISSSSTGSEIEQIHSLIPLVNSSGGSEGSSFHSQELQNSSQSGVFANVQGESQIDDATTPIEEEWKTWLNNDGDEQRNIMFMQDHRSDYTPLKSLTGVFSDDSSDDNDSDLISPKTNSIGTSSTCASFASSNHQIDQTQHSPDSTVQLVSLTQEVSQGPGQVTVIREHKLGEESVKKKRASFVYRMIHRLVKKIHQCYSISRT

SEQ ID NO: 337 - DNA, 1921 bp, Arabidopsis thaliana
  G581
ccaagatcatgacccaagtcaaccactctctctcataattcagacacagtactcaactttaaagacactcttttaagactttccatcaggaccaagctgagaaagagaaagcaataaagaaagaaagaaaaggaaataaagcttcaataccaaacccttctttaataaattttgccttttggttgtctcctctttatcaatcactttggttccatacttttaaattcagttcttcacgatatctagatatgtctttgacaatggctgatggtgtagaagctgcagcaggaagaagtaaaagacaaaacagcttattaagaaaacaacttgctttagctgtaagaagtgttcaatggagctacgcaatcttctggtcgtcttcacttactcaacctggggttttggagtggggagaaggatgttacaatggagatatgaagaagaggaagaagagttatgaatctcattataaatatgggttgcaaaaaagcaaggagcttcggaaactttatttgtctatgcttgaaggagacagtggtactactgttagtactactcatgataatctcaatgatgatgatgataattgtcacagtacaagtatgatgctgtcaccagatgacctctctgatgaagagtggtactatttagtctccatgtcctatgtcttctctccttcacaatgtttgcctggaagagcttcagcgacgggtgagaccatatggctctgcaacgctcaatatgcggagaacaagctcttctctcgttctttgttagcaagaagcgcatcaattcagactgttgtgtgtttcccttacttgggcggagtcattgagctgggcgtcactgaattgatttcagaagaccataacctgcttcgaaacatcaaatcttgcttgatggaaatatctgcacaccaagacaacgatgacgagaagaagatggagattaagatcagtgaagagaagcatcagcttccattaggtatttctgatgaagacttgcattacaaaagaaccatttcaacagtactcaactactccgcagatagatcaggtaagaacgataagaacattcgtcatcgtcagccaaatattgttacttctgaacctggctcaagtttcttgcggtggaagcaatgtgagcagcaagtctcgggttttgttcagaaaaaaaagtcacagaatgtgttgcggaagatattgcatgatgtccctttgatgcacacaaagagaatgttcccaagtcagaactctggtctgaatcaagatgatccttcagatagaagaaaagagaacgaaaagttcagtgtccttagaactatggttcccactgtcaacgaggttgataaagaatcgatactaaacaacacaatcaagtacctgcaagaactggaggcaagagtagaagagctagaatcttgtatgggatcagttaattttgtagaaagacaaagaaagacgacagagaaccttaacgactctgtgttgatcgaagagacatcagggaactacgatgatagcacgaagatcgatgacaattcaggagaaaccgaacaagtcactgttttcagagataagacacatttgagagttaaactcaaagaaacagaagttgtgatcgaagtaagatgttcttacagagactacatagttgcggacatcatggaaactctgagcaatcttcacatggatgctttctctgttagatctcacacgctcaataagttcctcacattgaatctcaaggccaagtttcgcggggctgcagttgcgtccgtaggaatgattaagcgagagctgagaagagtcattggtgatttgttttaatgttcttcttagtaaaaattcttatattttcttaaacttttgatgaaatgttatatttatctagactttcgtgaaccgatatgcgatgtgcc

SEQ ID NO: 338 - protein, 526 aa, Arabidopsis thaliana
  G581
MSLTMADGVEAAAGRSKRQNSLLRKQLALAVRSVQWSYAIFWSSSLTQPGVLEWGEGCYNGDMKKRKKSYESHYKYGLQKSKELRKLYLSMLEGDSGTTVSTTHDNLNDDDDNCHSTSMMLSPDDLSDEEWYYLVSMSYVFSPSQCLPGRASATGETIWLCNAQYAENKLFSRSLLARSASIQTVVCFPYLGGVIELGVTELISEDHNLLRNIKSCLMEISAHQDNDDEKKMEIKISEEKHQLPLGISDEDLHYKRTISTVLNYSADRSGKNDKNIRHRQPNIVTSEPGSSFLRWKQCEQQVSGFVQKKKSQNVLRKILHDVPLMHTKRMFPSQNSGLNQDDPSDRRKENEKFSVLRTMVPTVNEVDKESILNNTIKYLQELEARVEELESCMGSVNFVERQRKTTENLNDSVLIEETSGNYDDSTKIDDNSGETEQVTVFRDKTHLRVKLKETEVVIEVRCSYRDYIVADIMETLSNLHMDAFSVRSHTLNKFLTLNLKAKFRGAAVASVGMIKRELRRVIGDLF

SEQ ID NO: 339 - DNA, 2299 bp, Arabidopsis thaliana
  G585
ctctcaaacatttctctgtttgttccggcgaaaacggcaactgtttcatcaaatgacaaacacaaaaaccttaacatctagtttgtatcctctctgatacttcaaaaaaaatggatgaagaaacaatggctaccggacaaaacagaacaactgtgccagagaatctgaagaaacacctcgcagtttcagttcgaaacattcaatggagttatggtatcttttggtctgtctctgcttctcagtctggagttttagaatggggagatggatactataatggagatatcaaaacgaggaagacgattcaagcttcggagatcaaagctgatcagcttggtctacggaggagcgagcagcttagcgagctttacgagtctctctccgtcgctgaatcttcttcttcaggcgttgctgccggatctcaagtcaccagacgagcttccgccgccgcactttcaccggaagatctcgccgacaccgagtggtactatttggtttgtatgtctttcgtcttcaacattggtgaaggaatgcctggacggacgtttgcaaacggtgaaccgatatggttgtgcaacgctcatacggcggatagtaaagtgtttagccgttctcttctagcaaaaagtgctgcggttaagacagtggtttgcttcccgttccttggaggagtcgttgagattggtaccacagaacatattacggaagacatgaatgtaatacaatgcgtgaagacatcattcctcgaagcccctgatccgtacgctacaatattaccagcaagatccgattatcacatcgacaacgttcttgatccgcaacagattctaggcgacgagatttacgcgcctatgttcagtacggagccttttccaacagcttctccgagcagaactaccaacggtttcgatcaagaacatgaacaagtagcagatgatcatgattctttcatgaccgaaagaatcactggaggagcttctcaggtgcaaagctggcagctcatggacgacgagcttagtaactgcgttcaccagtcgctaaattccagcgattgcgtctctcaaacgtttgttgaaggggcggctggacgggttgcttacggtgcaagaaagagtagagttcaaagactagggcaaattcaagagcaacagagaaatgtgaagacattgtcatttgatccaagaaacgacgacgttcattaccaaagtgtgatctcaacgatttttaagaccaaccatcagttaattctcggaccgcagtttcgaaactgcgataaacagtcaagcttcactaggtggaagaaatcatcgtcatcatcatcaggaaccgccacggtcacggcaccatcacaaggaatgttaaagaaaattattttcgatgttccgcgagtgcaccagaaagagaagttaatgttggactcaccagaagccagagatgaaactgggaaccatgcggttttagagaagaagcgccgcgagaaattgaacgaacggttcatgaccttgagaaaaatcattccgtcaatcaacaagatcgataaagtatcgattcttgacgatacgatagagtatcttcaagaactcgagagacgggttcaagaactagaatcttgcagagaatcaaccgatacagagactcgtgggacgatgacgatgaagaggaagaaaccatgcgacgcaggagaaagaacatcagctaattgcgcaaataatgaaacaggaaatgggaagaaggtgtcggttaacaatgttggtgaagccgagccagcagataccggttttactggtttaaccgataatttaaggatcggttcgtttggtaatgaggtggttattgagcttagatgtgcttggagagaaggagtattgcttgagataatggatgtgattagtgatctccatttggattctcattcggttcaatcctcgaccggagacggtttgctctgcttaaccgtcaattgcaagcacaaggggtcaaaaatagcgacaccaggaatgatcaaagaagcacttcaaagggttgcatggatctgttgaagactacttagttaaaattgacagcaaagaaaaaacattcccggtttggtttctattctttggttttcttctaaccgggttttaggaattaatgttatgtttatcatttgttttttgttttttttttgtgtctttttttccgttgcttaacgtaggtgaagaggaacatacactatgcgtattttgtttgaggtagattattttaagggtattagtaatagtaatagccagtttagatgattttgtgttcttttgttgtt

SEQ ID NO: 340 - protein, 642 aa, Arabidopsis thaliana
  G585
MDEETMATGQNRTTVPENLKKHLAVSVRNIQWSYGIFWSVSASQSGVLEWGDGYYNGDIKTRKTIQASEIKADQLGLRRSEQLSELYESLSVAESSSSGVAAGSQVTRRASAAALSPEDLADTEWYYLVCMSFVFNIGEGMPGRTFANGEPIWLCNAHTADSKVFSRSLLAKSAAVKTVVCFPFLGGVVEIGTTEHITEDMNVIQCVKTSFLEAPDPYATILPARSDYHIDNVLDPQQILGDEIYAPMFSTEPFPTASPSRTTNGFDQEHEQVADDHDSFMTERITGGASQVQSWQLMDDELSNCVHQSLNSSDCVSQTFVEGAAGRVAYGARKSRVQRLGQIQEQQRNVKTLSFDPRNDDVHYQSVISTIFKTNHQLILGPQFRNCDKQSSFTRWKKSSSSSSGTATVTAPSQGMLKKIIFDVPRVHQKEKLMLDSPEARDETGNHAVLEKKRREKLNERFMTLRKIIPSINKIDKVSILDDTIEYLQELERRVQELESCRESTDTETRGTMTMKRKKPCDAGERTSANCANNETGNGKKVSVNNVGEAEPADTGFTGLTDNLRIGSFGNEVVIELRCAWREGVLLEIMDVISDLHLDSHSVQSSTGDGLLCLTVNCKHKGSKIATPGMIKEALQRVAWIC

SEQ ID NO: 341 - DNA, 2062 bp, Arabidopsis thaliana
  G586
catgactagtcataacctttaaatcacttctgctttttttctgtttctcttttgatttattcaaagacaacaaagttttgtttttgacaaaaaatctgatctttgtttgttcgtttgtttgttacatggggatgaagaaacaatggcaaccggagaaaacagaacggtgccggacaatctaaagaaacagctcgcagtttcagttcgaaacattcaatggagttatggaatcttctggtctgtctctgcttctcaaccaggagtgttggagtggggagatggatattacaatggagacataaagacaaggaagacgattcaagcagcagaagtcaaaattgaccagttaggtcttgagagaagtgagcagcttagagagctttatgaatctctctccctcgctgaatcctcagcttccggtagctctcaggtcactagacgagcttccgccgccgctctctcaccggaggacctcaccgacaccgagtggtactacttagtatgcatgtctttcgtcttcaacatcggtgaaggaatccccggaggagcgttatccaatggagaaccaatatggctttgtaacgctgaaaccgccgatagcaaagtcttcactcgttctcttctagctaaaagtgcttcgcttcagacagtggtttgcttcccgtttcttggaggagtccttgagattggcacgaccgaacatattaaagaggacatgaacgtgatacaaagtgttaagacgttgttccttgaagctcctccatatactacaatatcgacaagatcagactatcaagaaatttttgatcccttaagtgacgataaatacactccggtgtttataaccgaagcttttccaacaacttctactagcgggtttgagtatgaacctgaggatcatgattcgttcatcaacgatggtggtgcgtctcaggtacaaagctggcagtttgtgggtgaagaaatcagtaactgcattcaccaatcgttaaattcaagcgattgcgtttcccaaacgtttgttggaacaaccgggagacttgcttgcgatccaaggaagagtaggattcaacggttaggtcagattcaagaacagagtaaccatgtaaatatggacgacgatgttcattaccaaggcgtgatatcgacgattttcaaaacaacgcatcagctaatactcggaccgcagtttcagaacttcgataagcggtctagcttcacaaggtggaagcgatcatcatctgtgaaaacattgggagagaaatcgcagaagatgataaagaagatactcttcgaggttcctttgatgaacaagaaagaagagttgttaccggacacaccagaggaaaccgggaaccatgccttgtccgagaagaaacgccgcgagaaattgaatgaacggtttatgacattgagatcaatcattccctcaattagtaagattgataaagtgtcgattcttgatgatacaattgagtatcttcaagatttacagaaacgggttcaagagttggaatcttgtagagaatctgctgatacagagacacggataacgatgatgaagaggaagaaaccggatgatgaggaggaaagagcatcagcgaattgtatgaacagcaaaaggaaggggagtgatgtgaatgtaggagaagatgaaccagctgatatcggttatgctggtctaacggataacttaaggatcagttcattaggtaacgaggtggttattgagcttagatgcgcttggagagaagggatattgcttgagataatggatgtgattagtgatctcaacttggattctcactcggttcagtcgtcaaccggagacggtttactctgcttaactgtcaattgcaagcataaagggacaaaaatagcaacaacaggaatgatccaagaggcacttcaaagggttgcatggatatgttaaggattcaaggtttagatttgacaaaattagctttttctctggtttggtttcccaattttcggtaatcagtgattctaaccgagtttttgtgattttggaaaaaaaaaaaaaaaaaaaaaaaaaaaaaaa

SEQ ID NO: 342 - protein, 596 aa, Arabidopsis thaliana
  G586
MATGENRTVPDNLKKQLAVSVRNIQWSYGIFWSVSASQPGVLEWGDGYYNGDIKTRKTIQAAEVKIDQLGLERSEQLRELYESLSLAESSASGSSQVTRRASAAALSPEDLTDTEWYYLVCMSFVFNIGEGIPGGALSNGEPIWLCNAETADSKVFTRSLLAKSASLQTVVCFPFLGGVLEIGTTEHIKEDMNVIQSVKTLFLEAPPYTTISTRSDYQEIFDPLSDDKYTPVFITEAFPTTSTSGFEYEPEDHDSFINDGGASQVQSWQFVGEEISNCIHQSLNSSDCVSQTFVGTTGRLACDPRKSRIQRLGQIQEQSNHVNMDDDVHYQGVISTIFKTTHQLILGPQFQNFDKRSSFTRWKRSSSVKTLGEKSQKMIKKILFEVPLMNKKEELLPDTPEETGNHALSEKKRREKLNERFMTLRSIIPSISKIDKVSILDDTIEYLQDLQKRVQELESCRESADTETRITMMKRKKPDDEEERASANCMNSKRKGSDVNVGEDEPADIGYAGLTDNLRISSLGNEVVIELRCAWREGILLEIMDVISDLNLDSHSVQSSTGDGLLCLTVNCKHKGTKIATTGMIQEALQRVAWIC

SEQ ID NO: 343 - DNA, 2526 bp, Arabidopsis thaliana
  G680
cagttatcttcttccttcttctctctgttttttaaatttatttttagagaattttttttgttttgcttccgatttgattatttccgggaacgatgacttctccggggagttcccggtgagatgataagtcagattgcatacttgtctcctccatggctactctcaagggttttggctgcggtggattcgtttggtttctctagaatctaaagaggttatcacaacggctttgcaatttgaaaactttcatgtttggggagatcaaagatggtttcttttttatactttacttgttagagaggatttgaagcagcgaatagctgcaaccggtcctgttatggatactaatacatctggagaagaattattagctaaggcaagaaagccatatacaataacaaagcagcgagagcgatggactgaggatgagcatgagaggtttctagaagccttgaggctttatggaagagcttggcaacgaattgaagaacatattgggacaaagactgctgttcagatcagaagtcatgcacaaaagttcttcacaaagttggagaaagaggctgaagttaaaggcatccctgtttgccaagctttggacatagaaattccgcctcctcgtcctaaacgaaaacccaatactccttatcctcgaaaacctgggaacaacggtacatcttcctctcaagtatcatcagcaaaagatgcaaaacttgtttcatcggcctcttcttcacagttgaatcaggcgttcttggatttggaaaaaatgccgttctctgagaaaacatcaactggaaaagaaaatcaagatgagaattgctcgggtgtttctactgtgaacaagtatcccttaccaacgaaacaggtaagtggcgacattgaaacaagtaagacctcaactgtggacaacgcggttcaagatgttcccaagaagaacaaagacaaagatggtaacgatggtactactgtgcacagcatgcaaaactacccttggcatttccacgcagatattgtgaacgggaatatagcaaaatgccctcaaaatcatccctcaggtatggtatctcaagacttcatgtttcatcctatgagagaagaaactcacgggcacgcaaatcttcaagctacaacagcatctgctactactacagcttctcatcaagcgtttccagcttgtcattcacaggatgattaccgttcgtttctccagatatcatctactttctccaatcttattatgtcaactctcctacagaatcctgcagctcatgctgcagctacattcgctgcttcggtctggccttatgcgagtgtcgggaattctggtgattcatcaaccccaatgagctcttctcctccaagtataactgccattgccgctgctacagtagctgctgcaactgcttggtgggcttctcatggacttcttcctgtatgcgctccagctccaataacatgtgttccattctcaactgttgcagttccaactccagcaatgactgaaatggataccgttgaaaatactcaaccgtttgagaaacaaaacacagctctgcaagatcaaaccttggcttcgaaatctccagcttcatcatctgatgattcagatgagactggagtaaccaagctaaatgccgactcaaaaaccaatgatgataaaattgaggaggttgttgttactgccgctgtgcatgactcaaacactgcccagaagaaaaatcttgtggaccgctcatcgtgtggctcaaatacaccttcagggagtgacgcagaaactgatgcattagataaaatggagaaagataaagaggatgtgaaggagacagatgagaatcagccagatgttattgagttaaataaccgtaagattaaaatgagagacaacaacagcaacaacaatgcaactactgattcgtggaaggaagtctccgaagagggtcgtatagcgtttcaggctctctttgcaagagaaagattgcctcaaagcttttcgcctcctcaagtggcagagaatgtgaatagaaaacaaagtgacacgtcaatgccattggctcctaatttcaaaagccaggattcttgtgctgcagaccaagaaggagtagtaatgatcggtgttggaacatgcaagagtcttaaaacgagacagacaggatttaagccatacaagagatgttcaatggaagtgaaagagagccaagttgggaacataaacaatcaaagtgatgaaaaagtctgcaaaaggcttcgattggaaggagaagcttctacatgacagacttggaggtaaaaaaaaaacatccacatttttatcaatatctttaaatctagtgttagtagtttgcttctccaatctttatgaaagagacttttaattttccttccgaacatttctttggtcatgtcaggttctgtaccatattaccccatgtcttgtctcttgtctctgtttgtgtatgctacttgtggtctatatgtcatctgctactactgttaattaaccattaagcaatggatttgtcttta

SEQ ID NO: 344 - protein, 645 aa, Arabidopsis thaliana
  G680
MDTNTSGEELLAKARKPYTITKQRERWTEDEHERFLEALRLYGRAWQRIEEHIGTKTAVQIRSHAQKFFTKLEKEAEVKGIPVCQALDIEIPPPRPKRKPNTPYPRKPGNNGTSSSQVSSAKDAKLVSSASSSQLNQAFLDLEKMPFSEKTSTGKENQDENCSGVSTVNKYPLPTKQVSGDIETSKTSTVDNAVQDVPKKNKDKDGNDGTTVHSMQNYPWHFHADIVNGNIAKCPQNHPSGMVSQDFMFHPMREETHGHANLQATTASATTTASHQAFPACHSQDDYRSFLQISSTFSNLIMSTLLQNPAAHAAATFAASVWPYASVGNSGDSSTPMSSSPPSITAIAAATVAAATAWWASHGLLPVCAPAPITCVPFSTVAVPTPAMTEMDTVENTQPFEKQNTALQDQTLASKSPASSSDDSDETGVTKLNADSKTNDDKIEEVVVTAAVHDSNTAQKKNLVDRSSCGSNTPSGSDAETDALDKMEKDKEDVKETDENQPDVIELNNRKIKMRDNNSNNNATTDSWKEVSEEGRIAFQALFARERLPQSFSPPQVAENVNRKQSDTSMPLAPNFKSQDSCAADQEGVVMIGVGTCKSLKTRQTGFKPYKRCSMEVKESQVGNINNQSDEKVCKRLRLEGEAST

SEQ ID NO: 345 - DNA, 2240 bp, Arabidopsis thaliana
  G214
tgagatttctccatttccgtagcttctggtctcttttctttgtttcattgatcaaaagcaaatcacttcttcttcttcttcttctcgatttcttactgttttcttatccaacgaaatctggaattaaaaatggaatctttatcgaatccaagctgattttgtttctttcattgaatcatctctctaaagtggaattttgtaaagagaagatctgaagttgtgtagaggagcttagtgatggagacaaattcgtctggagaagatctggttattaagactcggaagccatatacgataacaaagcaacgtgaaaggtggactgaggaagaacataatagattcattgaagctttgaggctttatggtagagcatggcagaagattgaagaacatgtagcaacaaaaactgctgtccagataagaagtcacgctcagaaatttttctccaaggtagagaaagaggctgaagctaaaggtgtagctatgggtcaagcgctagacatagctattcctcctccacggcctaagcgtaaaccaaacaatccttatcctcgaaagacgggaagtggaacgatccttatgtcaaaaacgggtgtgaatgatggaaaagagtcccttggatcagaaaaagtgtcgcatcctgagatggccaatgaagatcgacaacaatcaaagcctgaagagaaaactctgcaggaagacaactgttcagattgtttcactcatcagtatctctctgctgcatcctccatgaataaaagttgtatagagacatcaaacgcaagcactttccgcgagttcttgccttcacgggaagagggaagtcagaataacagggtaagaaaggagtcaaactcagatttgaatgcaaaatctctggaaaacggtaatgagcaaggacctcagacttatccgatgcatatccctgtgctagtgccattggggagctcaataacaagttctctatcacatcctccttcagagccagatagtcatccccacacagttgcaggagattatcagtcgtttcctaatcatataatgtcaacccttttacaaacaccggctctttatactgccgcaactttcgcctcatcattttggcctcccgattctagtggtggctcacctgttccagggaactcacctccgaatctggctgccatggccgcagccactgttgcagctgctagtgcttggtgggctgccaatggattattacctttatgtgctcctcttagttcaggtggtttcactagtcatcctccatctacttttggaccatcatgtgatgtagagtacacaaaagcaagcactttacaacatggttctgtgcagagccgagagcaagaacactccgaggcatcaaaggctcgatcttcactggactcagaggatgttgaaaataagagtaaaccagtttgtcatgagcagccttctgcaacacctgagagtgatgcaaagggttcagatggagcaggagacagaaaacaagttgaccggtcctcgtgtggctcaaacactccgtcgagtagtgatgatgttgaggcggatgcatcagaaaggcaagaggatggcaccaatggtgaggtgaaagaaacgaatgaagacactaataaacctcaaacttcagagtccaatgcacgccgcagtagaatcagctccaatataaccgatccatggaagtctgtgtctgacgagggtcgaattgccttccaagctctcttctccagagaggtattgccgcaaagttttacatatcgagaagaacacagagaggaagaacaacaacaacaagaacaaagatatccaatggcacttgatcttaacttcacagctcagttaacaccagttgatgatcaagaggagaagagaaacacaggatttcttggaatcggattagatgcttcaaagctaatgagtagaggaagaacaggttttaaaccatacaaaagatgttccatggaagccaaagaaagtagaatcctcaacaacaatcctatcattcatgtggaacagaaagatcccaaacggatgcggttggaaactcaagcttccacatgagactctattttcatctgatctgttgtttgtactctgtttttaagttttcaagaccactgctacattttctttttcttttgaggcctttgtatttgtttccttgtccatagtcttcctgtaacatttgactctgtattattcaacaaatcataaactgtttaatctttttttttcca

SEQ ID NO: 346 - protein, 608 aa, Arabidopsis thaliana
  G214
METNSSGEDLVIKTRKPYTITKQRERWTEEEHNRFIEALRLYGRAWQKIEEHVATKTAVQIRSHAQKFFSKVEKEAEAKGVAMGQALDIAIPPPRPKRKPNNPYPRKTGSGTILMSKTGVNDGKESLGSEKVSHPEMANEDRQQSKPEEKTLQEDNCSDCFTHQYLSAASSMNKSCIETSNASTFREFLPSREEGSQNNRVRKESNSDLNAKSLENGNEQGPQTYPMHIPVLVPLGSSITSSLSHPPSEPDSHPHTVAGDYQSFPNHIMSTLLQTPALYTAATFASSFWPPDSSGGSPVPGNSPPNLAAMAAATVAAASAWWAANGLLPLCAPLSSGGFTSHPPSTFGPSCDVEYTKASTLQHGSVQSREQEHSEASKARSSLDSEDVENKSKPVCHEQPSATPESDAKGSDGAGDRKQVDRSSCGSNTPSSSDDVEADASERQEDGTNGEVKETNEDTNKPQTSESNARRSRISSNITDPWKSVSDEGRIAFQALFSREVLPQSFTYREEHREEEQQQQEQRYPMALDLNFTAQLTPVDDQEEKRNTGFLGIGLDASKLMSRGRTGFKPYKRCSMEAKESRILNNNPIIHVEQKDPKRMRLETQAST

SEQ ID NO: 347 - DNA, 687 bp, Arabidopsis thaliana
  G212
atgagaataaggagaagagatgaaaaagagaatcaagaatacaagaaaggtttatggacagttgaagaagacaacatccttatggactatgttcttaatcatggcactggccaatggaaccgcatcgtcagaaaaactgggctaaagagatgtgggaaaagttgtagactgagatggatgaattatttgagccctaatgtgaacaaaggcaatttcactgaacaagaagaagacctcattattcgtctccacaagctcctcggcaatagatggtctttgatagctaaaagagtaccgggaagaacagataaccaagtcaagaactactggaacactcatctcagcaaaaaactcgtcggagattactcctccgccgtcaaaaccaccggagaagacgacgactctccaccgtcattgttcatcactgccgccacaccttcttcttgtcatcatcaacaagaaaatatctacgagaatatagccaagagctttaacggcgtcgtatcagcttcgtacgaggataaaccaaaacaagaactggctcaaaaagatgtcctaatggcaactactaatgatccaagtcactattatggcaataacgctttatgggttcatgacgacgattttgagcttagttcactcgtaatgatgaattttgcttctggtgatgttgagtactgcctttag

SEQ ID NO: 348 - protein, 228 aa, Arabidopsis thaliana
  G212
MRIRRRDEKENQEYKKGLWTVEEDNILMDYVLNHGTGQWNRIVRKTGLKRCGKSCRLRWMNYLSPNVNKGNFTEQEEDLIIRLHKLLGNRWSLIAKRVPGRTDNQVKNYWNTHLSKKLVGDYSSAVKTTGEDDDSPPSLFITAATPSSCHHQQENIYENIAKSFNGVVSASYEDKPKQELAQKDVLMATTNDPSHYYGNNALWVHDDDFELSSLVMMNFASGDVEYCL

SEQ ID NO: 349 - DNA, 612 bp, Arabidopsis thaliana
  G676
atgagaaagaaagtaagtagtagtggtgacgaaggaaacaatgagtacaagaaaggtttgtggacagtagaagaagacaaaatcctcatggattatgtcaaagctcatggcaaaggtcactggaatcgtattgccaaaaagactggtttaaagagatgtggaaagagttgtagattgaggtggatgaattatctcagccctaatgtgaaaagaggcaatttcaccgagcaagaagaggatcttatcattaggctccacaagttgcttggtaataggtggtctttaattgctaaaagagtgccgggtcgaacggataatcaagtgaagaactattggaacacgcatcttagtaagaaactcggaatcaaagatcagaaaaccaaacagagcaatggtgatattgtttatcaaatcaatctcccgaatcctaccgaaacatcagaagaaacgaaaatctcgaatattgtcgataacaataatatcctcggagatgaaattcaagaagatcatcaaggaagtaactacttgagttcactttgggttcatgaggatgagtttgagcttagcacactcaccaacatgatggactttatagatggacactgtttttga

SEQ ID NO: 350 - protein, 203 aa, Arabidopsis thaliana
  G676
MRKKVSSSGDEGNNEYKKGLWTVEEDKILMDYVKAHGKGHWNRIAKKTGLKRCGKSCRLRWMNYLSPNVKRGNFTEQEEDLIIRLHKLLGNRWSLIAKRVPGRTDNQVKNYWNTHLSKKLGIKDQKTKQSNGDIVYQINLPNPTETSEETKISNIVDNNNILGDEIQEDHQGSNYLSSLWVHEDEFELSTLTNMMDFIDGHCF

SEQ ID NO: 351 - DNA, 2238 bp, Arabidopsis thaliana
  G388
atggccgtcgacatgtcttccaaacaacccaccaaagactttttctcctctccagccctctctctatctctcgctgggatattccggaatgcatcctccggcagcaccaaccctgaggaggatttcctgggcagaagagtagttgacgatgaggatcgcactgtggagatgagcagcgagaactcaggacccacgagatccagatcagaggaggatttggagggtgaggatcacgacgatgaggaggaggaagaggaggacggcgcagctggaaacaagggcactaataagagaaagaggaagaagtatcatcgtcacaccaccgatcagatcagacacatggaagcgctattcaaagagacaccacatccggacgagaagcaaagacagcagctgagcaagcaactagggctggcccctcgccaggtcaagttctggttccaaaaccgccgcacacagatcaaggctattcaagaacggcacgagaactccctgctcaaggcggaactagagaagctgcgagaggaaaacaaagccatgagggagtctttttccaaggctaattcctcctgccccaactgcggaggaggccccgatgatctccacctcgaaaactccaaactgaaagccgagctcgataagcttcgtgcagctcttggacgcactccctatcccctgcaggcttcatgctccgacgatcaagaacaccgtctcggctctctcgatttctacacgggcgtctttgccctcgagaagtcccgtattgccgagatttctaaccgagccacccttgaactccagaagatggccacctcaggcgaacctatgtggctccgcagcgttgagactggccgtgagattctcaactacgatgagtacctcaaggagtttccccaagcgcaagcctcttcgtttcctggaaggaaaaccatcgaagcatctagagatgcggggattgtgtttatggacgcacataaacttgcccagagtttcatggacgtgggacaatggaaagagacatttgcatgcttgatctcaaaggctgcaacggtcgatgttatccggcaaggcgaagggccttcacggatcgacggggctattcagctgatgttcggagagatgcagctgctcactccggtcgtccccacaagagaagtgtacttcgtgagaagctgccggcagctgagccctgagaaatgggcaatagtggacgtctcggtctccgtggaggacagcaacacggagaaggaggcttctcttctgaaatgtcgaaaactcccctccggttgcatcatcgaggacacctccaacggtcactccaaggtcacctgggtggagcacctcgacgtgtctgcatccacagttcagcctctcttccgctccttagtcaacaccggtttggcctttggggctcgacactgggtcgccacccttcagctccattgcgaacgccttgtcttcttcatggctaccaacgtccccaccaaagactctctcggagttacaactcttgccgggagaaagagtgtgctgaagatggctcagagaatgacacaaagcttctaccgcgccattgctgcatcaagctaccatcaatggaccaaaatcaccaccaaaactggacaagacatgcgggtttcttccaggaagaaccttcatgatcctggcgagcccacgggagtcattgtctgcgcttcttcttcgctgtggttacctgtttctccagctcttctcttcgatttctttagagatgaagctcgtcggcatgagtgggatgctttgtcaaacggagctcatgttcagtctattgcaaacttatccaagggacaagacagaggcaactcagtggcaatccagacagtgaaatcgagagaaaagagcatatgggtgctgcaagacagcagcactaactcgtatgagtcggtggtggtatacgctcccgtagatataaacacgacacagctggtgctcgcgggacatgatccaagcaacatccaaatcctcccctctggattctcaatcatacctgatggagtagagtcacggccactggtaataacgtctacacaagacgacagaaacagccaaggagggtcgctcctgacactcgccctccaaaccctcatcaacccttctcctgcagcaaagctgaatatggagtctgtggaatccgtgacaaacctcgtctcagtcacactacacaacattaagagaagtctacaaatcgaagattgctga

SEQ ID NO: 352 - protein, 745 aa, Arabidopsis thaliana
  G388
MAVDMSSKQPTKDFFSSPALSLSLAGIFRNASSGSTNPEEDFLGRRVVDDEDRTVEMSSENSGPTRSRSEEDLEGEDHDDEEEEEEDGAAGNKGTNKRKRKKYHRHTTDQIRHMEALFKETPHPDEKQRQQLSKQLGLAPRQVKFWFQNRRTQIKAIQERHENSLLKAELEKLREENKAMRESFSKANSSCPNCGGGPDDLHLENSKLKAELDKLRAALGRTPYPLQASCSDDQEHRLGSLDFYTGVFALEKSRIAEISNRATLELQKMATSGEPMWLRSVETGREILNYDEYLKEFPQAQASSFPGRKTIEASRDAGIVFMDAHKLAQSFMDVGQWKETFACLISKAATVDVIRQGEGPSRIDGAIQLMFGEMQLLTPVVPTREVYFVRSCRQLSPEKWAIVDVSVSVEDSNTEKEASLLKCRKLPSGCIIEDTSNGHSKVTWVEHLDVSASTVQPLFRSLVNTGLAFGARHWVATLQLHCERLVFFMATNVPTKDSLGVTTLAGRKSVLKMAQRMTQSFYRAIAASSYHQWTKITTKTGQDMRVSSRKNLHDPGEPTGVIVCASSSLWLPVSPALLFDFFRDEARRHEWDALSNGAHVQSIANLSKGQDRGNSVAIQTVKSREKSIWVLQDSSTNSYESVVVYAPVDINTTQLVLAGHDPSNIQILPSGFSIIPDGVESRPLVITSTQDDRNSQGGSLLTLALQTLINPSPAAKLNMESVESVTNLVSVTLHNIKRSLQIEDC

SEQ ID NO: 353 - DNA, 922 bp, Arabidopsis thaliana
  G484
attatattccgtacaatccgatcgatttcccggcgccagatctcaccgcgactcgtctactttccgatttggttcgtgttgactcagttacgattaaactatggatccaatggatatagtcggcaaatccaaggaagacgcttctcttccaaaagctacgatgactaaaattataaaggagatgttaccaccagatgttcgtgttgcaagagatgctcaagatcttctcattgaatgttgtgtagagtttataaatcttgtatcttcagaatctaatgatgtttgtaacaaagaggataaacggacgattgctcctgagcatgttctcaaggcattacaggttcttggttttggagaatacattgaagaagtctatgctgcgtatgagcaacataagtatgaaacaatgcaggacacacagaggagcgtgaaatggaaccctggagctcaaatgactgaggaggaagcagcagctgagcaacaacgtatgtttgcagaagcacgtgcaagaatgaatggaggtgtttcggttcctcaacctgaacatccagaaactgaccagagaagtccgcaaagctaactgaaaccgtaagggtaagtgttaggcaagaaaaaacaacatccttttaacattcccttgtaagttgcaaatgcgtatgttctctgtttatatgctcttagtatgatatatgttagttagtgtttcacgatctaaaaacacttgtgattcagatgtaattagtaagcattccttgttttgtgtttactttgtgtcttgactaagcatggtgggtcaggtctacacaaagcatctgattcgatgacttacaggaatcttaatgtttgtagattggataaatttggtgattggtgtaattgtttttccataaacacaatgcaatcattgtttagtgttgttaac

SEQ ID NO: 354 - protein, 159 aa, Arabidopsis thaliana
  G484
MDPMDIVGKSKEDASLPKATMTKIIKEMLPPDVRVARDAQDLLIECCVEFINLVSSESNDVCNKEDKRTIAPEHVLKALQVLGFGEYIEEVYAAYEQHKYETMQDTQRSVKWNPGAQMTEEEAAAEQQRMFAEARARMNGGVSVPQPEHPETDQRSPQS

SEQ ID NO: 355 - DNA, 476 bp, Arabidopsis thaliana
  G486
gcgagagctgatagattcactgaaacaaaagagaaaaatgacagacgaagatagattgttgccaatagccaatgtagggagacttatgaagcaaatcctaccatcaaatgcaaagatctcaaaagaagcaaaacaaacagttcaagaatgtgcaacagagttcataagctttgttacatgcgaagcatcagagaagtgccacagggagaatcggaagacggtgaatggagacgacatctggtgggctctcagcactctcggcctcgataactatgctgacgccgtgggtaggcatcttcacaagtaccgtgaagccgagagagaaagaactgagcacaacaaaggtagcaatgatagtgggaatgagaaagaaaccaacactagaagtgatgtacagaaccaatcgacaaaatttattagagttgttgagaagggaagcagctcctcggcccgttgaactagacatctaagttctg

SEQ ID NO: 356 - protein, 139 aa, Arabidopsis thaliana
  G486
MTDEDRLLPIANVGRLMKQILPSNAKISKEAKQTVQECATEFISFVTCEASEKCHRENRKTVNGDDIWWALSTLGLDNYADAVGRHLHKYREAERERTEHNKGSNDSGNEKETNTRSDVQNQSTKFIRVVEKGSSSSAR

SEQ ID NO: 357 - DNA, 826 bp, Arabidopsis thaliana
  G620
gaattgaacttggaccagcacagcaacaacccaaccccaatgaccagctcagtcatagtagccggcgccggtgacaagaacaatggtatcgtggtccagcagcaaccaccatgtgtggctcgtgagcaagaccaatacatgccaatcgcaaacgtcataagaatcatgcgtaaaaccttaccgtctcacgccaaaatctctgacgacgccaaagaaacgattcaagaatgtgtctccgagtacatcagcttcgtgaccggtgaagccaacgagcgttgccaacgtgagcaacgtaagaccataactgctgaagatatcctttgggctatgagcaagcttgggttcgataactacgtggaccccctcaccgtgttcattaaccggtaccgtgagatagagaccgatcgtggttctgcacttagaggtgagccaccgtcgttgagacaaacctatggaggaaatggtattgggtttcacggcccatctcatggcctacctcctccgggtccttatggttatggtatgttggaccaatccatggttatgggaggtggtcggtactaccaaaacgggtcgtcgggtcaagatgaatccagtgttggtggtggctcttcgtcttccattaacggaatgccggcttttgaccattatggtcagtataagtgaagaaggagttattcttcatttttatatctattcaaaacatgtgtttcgatagatattttatttttatgtcttatcaataacatttctatataatgttgcttctttaaggaaaagtgttgtatgtcaatactttatgagaaactgatttatatatgcaaat

SEQ ID NO: 358 - protein, 208 aa, Arabidopsis thaliana
  G620
MTSSVIVAGAGDKNNGIVVQQQPPCVAREQDQYMPIANVIRIMRKTLPSHAKISDDAKETIQECVSEYISFVTGEANERCQREQRKTITAEDILWAMSKLGFDNYVDPLTVFINRYREIETDRGSALRGEPPSLRQTYGGNGIGFHGPSHGLPPPGPYGYGMLDQSMVMGGGRYYQNGSSGQDESSVGGGSSSSINGMPAFDHYGQYK

SEQ ID NO: 359 - DNA, 483 bp, Arabidopsis thaliana
  G1248
atggcggggaattatcattcgttccaaaatccaatccctcgataccagaattacaacttcgggagcagctcatctaatcatcaacatgaacatgatgggttagtggtggtggtggaggatcaacagcaagaagaaagcatgatggtaaaagaacaagacaggctacttccgatagcaaacgtaggaaggatcatgaagaacatcctcccagcaaacgcaaaggtctctaaagaagccaaagagactatgcaagaatgtgtgtccgagttcattagcttcgtcacgggagaagcatccgataaatgccacaaggagaagcgaaagaccgttaatggagacgatatctgttgggctatggctaatctagggtttgatgattacgccgcccagctcaagaagtacttacatcgttaccgagttctcgaaggtgagaaacctaatcatcacggcaaaggaggacctaaatcctcgccagataattaa

SEQ ID NO: 360 - protein, 160 aa, Arabidopsis thaliana
  G1248
MAGNYHSFQNPIPRYQNYNFGSSSSNHQHEHDGLVVVVEDQQQEESMMVKEQDRLLPIANVGRIMKNILPANAKVSKEAKETMQECVSEFISFVTGEASDKCHKEKRKTVNGDDICWAMANLGFDDYAAQLKKYLHRYRVLEGEKPNHHGKGGPKSSPDN

SEQ ID NO: 361 - DNA, 492 bp, Arabidopsis thaliana
  G2631
atggatccgatggatatagttggaaaatcaaaggaagatgcttcgcttccgaaagctaccatgacgaaaattataaaggagatgttacccgcagatgttcgtgttgctagagatgctcaagatctattgattgagtgttgtgtagagttcataaatcttatatcgtcggagtcgaatgaagtgtgtaacaaagaggataaacgaacaatagcccctgagcacgtactcaaagctttacaggttcttggctttggggaatacgtagaagaagtttatgccgcgtatgagcaacataaatatgaaaccatgcaggattcgcagagaagtgtgaagatgaatagcggagcagagatgacggaagaagaggcggcagcggaacaacagaggatgtttgcagaagctcgagcaagaatgaatggaggtgttacagttcctcaaccagagcaactagaagaaccccaacaacaacaacaaacaagtctacaaagctaa

SEQ ID NO: 362 - protein, 163 aa, Arabidopsis thaliana
  G2631
MDPMDIVGKSKEDASLPKATMTKIIKEMLPADVRVARDAQDLLIECCVEFINLISSESNEVCNKEDKRTIAPEHVLKALQVLGFGEYVEEVYAAYEQHKYETMQDSQRSVKMNSGAEMTEEEAAAEQQRMFAEARARMNGGVTVPQPEQLEEPQQQQQTSLQS

SEQ ID NO: 363 - DNA, 983 bp, Arabidopsis thaliana
  G280
aagttaatatgagaataatgagaaaaccactttcccaaattgctttttaaaatccctcctcacacagattccttccttcatcacctcacacactctctacgcttgacatggccttcgatctccaccatggctcagcttcagatacgcattcatcagaacttccgtcgttttctctcccaccttatcctcagatgataatggaagcgattgagtccttgaacgataagaacggctgcaacaaaacgacgattgctaagcacatcgagtcgactcaacaaactctaccgccgtcacacatgacgctgctcagctaccatctcaaccagatgaagaaaaccggtcagctaatcatggtgaagaacaattatatgaaaccagatccagatgctcctcctaagcgtggtcgtggccgtcctccgaagcagaagactcaggccgaatctgacgccgctgctgctgctgttgttgctgccaccgtcgtctctacagatccgcctagatctcgtggccgtccaccgaagccgaaagatccatcggagcctccccaggagaaggtcattaccggatctggaaggccacgaggacgaccaccgaagagaccgagaacagattcggagacggttgctgcgccggaaccggcagctcaggcgacaggtgagcgtaggggacgtgggagacctccgaaggtgaagccgacggtggttgctccggttgggtgctgaattaatcggtacttatgcaatttcggaatctttagttactgaaaaatggaatctcttagagagtaagagagtgctttaatttagcttaattagatttatttggatttctttcagtatttggattgtaaactttagaatttgtgtgtgtgttgttgcttagtcctgagataagatataacattagcgactgtgtattattattattactgcattgtgttatgtgaaactttgttctcttgttgaaaaaaaaaaaaaaaaaaa

SEQ ID NO: 364 - protein, 204 aa, Arabidopsis thaliana
  G280
MAFDLHHGSASDTHSSELPSFSLPPYPQMIMEAIESLNDKNGCNKTTIAKHIESTQQTLPPSHMTLLSYHLNQMKKTGQLIMVKNNYMKPDPDAPPKRGRGRPPKQKTQAESDAAAAAVVAATVVSTDPPRSRGRPPKPKDPSEPPQEKVITGSGRPRGRPPKRPRTDSETVAAPEPAAQATGERRGRGRPPKVKPTVVAPVGC

SEQ ID NO: 365 - DNA, 1964 bp, Arabidopsis thaliana
  G1367
tccttccacaaaacttttttaattttatctgaaaaattaaaacaaccgaaacaaaaaaaaaaaactaaaaatcaaaaatctcatcaccttccttgctctgtattttttctctctcactaaatcctccatggatccttctctctctgcaaccaatgatcctcatcatcctcctcctcctcagttcacatctttccctcctttcaccaacaccaaccccttcgcctctccaaaccaccccttcttcaccggacccaccgccgtcgcgccgccaaacaacatccatctctatcaagcagctcctccgcagcagccacaaacatctccagttcctcctcatccatctatttcccaccctccttactctgacatgatttgcacggcgattgcagcgttaaacgaaccagatgggtcaagcaagcaagctatttcgaggtacatagagagaatttacactgggattcctactgctcatggagctttgttgacacaccatctcaagactttgaagaccagtgggattcttgtcatggttaagaaatcttacaagcttgcttctactcctcctcctcctcctcctactagtgtagctcctagtcttgaacctcccagatctgatttcatagtcaacgagaaccaacctttacctgatccggttttggcttcttctactcctcagactattaaacgtggtcgtggtcgacctccaaaagctaaaccagatgttgttcaacctcaacctctgactaatggaaaactcacctgggaacagagtgaattacctgtctctcgaccagaggagatacagatacagccgccacagttaccgttacagccacagcagccggttaagagaccgccgggtcgtcctagaaaagatggaacttcgccgacggtgaagccagctgcttctgtttccggtggtgtggagactgtgaaacgaagaggtagacctccgagtggaagagctgctgggagggagagaaagcctatagtagtctcagctccagcttcagtgttcccgtatgttgctaatggtggtgttagacgccgagggagaccaaagagagttgacgctggtggtgcttcctctgttgctccaccaccaccaccaccaactaacgtagagagtggaggagaggaggttgcagtcaagaaacgaggaagaggacggcctcctaagattggaggtgttatcaggaagcctatgaagccgatgagaagctttgctcgtactggaaaacccgtaggaagacccagaaagaatgcggtgtcagtgggagcttctggacgacaagatggtgactatggagaactgaagaagaagtttgagttgtttcaagcgagagctaaggatattgtaattgtgttgaaatccgagataggaggaagtggaaatcaagcagtggttcaagccatacaggacctggaagggatagcagagacaacaaacgagccaaagcacatggaagaagtgcagctgccagacgaggaacaccttgaaaccgaaccagaagcagagggtcaaggacagacagaagcagaggcaatgcaagaagctctgttctaaagataaagccttgacataaaaagctagcaagtggtgggtttacttgttgtgtgttacatgaaatttttaatcttataagggtgtttgcaggagaaaaacaaaaagaacaatgtgatgaactgatgatgatgattgtgtctctaaccaaacaacaaggagaggtagggtaatgtctgtaaagtgaattaggatgttaccattgttcatgcttcccatctctctccatcgtccatatctgtgtaggcagctttgttctttgttccctcgtgttttttttagactgttgtgtctcttattctattttgtctccttaggctttttaggagttgttgttgatgtttatcaaaaacgcttatgtaatttttatgaccacttctactttttatgatggtttctt

SEQ ID NO: 366 - protein, 479 aa, Arabidopsis thaliana
  G1367
MDPSLSATNDPHHPPPPQFTSFPPFTNTNPFASPNHPFFTGPTAVAPPNNIHLYQAAPPQQPQTSPVPPHPSISHPPYSDMICTAIAALNEPDGSSKQAISRYIERIYTGIPTAHGALLTHHLKTLKTSGILVMVKKSYKLASTPPPPPPTSVAPSLEPPRSDFIVNENQPLPDPVLASSTPQTIKRGRGRPPKAKPDVVQPQPLTNGKLTWEQSELPVSRPEEIQIQPPQLPLQPQQPVKRPPGRPRKDGTSPTVKPAASVSGGVETVKRRGRPPSGRAAGRERKPIVVSAPASVFPYVANGGVRRRGRPKRVDAGGASSVAPPPPPPTNVESGGEEVAVKKRGRGRPPKIGGVIRKPMKPMRSFARTGKPVGRPRKNAVSVGASGRQDGDYGELKKKFELFQARAKDIVIVLKSEIGGSGNQAVVQAIQDLEGIAETTNEPKHMEEVQLPDEEHLETEPEAEGQGQTEAEAMQEALF

SEQ ID NO: 367 - DNA, 1445 bp, Arabidopsis thaliana
  G1944
tcgaccttcctaatttccaacctctgttcttagcaatatattttttctccaaaaataattctcagtttgattttcttcttctagctcttaagtatatttctttgttgttatttatcttttaatcctttaatctcatctttgtttatctttaatcaaaacccaaaatttacatgggttcttgaaaatctagaagaaataaaggaaacataacaaaaatagaaagaaaaagaagctaatggtcttaaatatggagtctaccggagaagctgttagatcaaccaccggtaacgacggtggtattacggtggttagatccgacgcgccgtcagatttccacgtagctcaaagatcagaaagctcaaaccaatctcccacctctgtcactcctcctccaccacagccatcgtctcatcacacagctcctccgccgctgcaaatttcgacggtgacgactacgactacgacggccgcgatggaaggtatctccggtggactgatgaagaagaagcgtggacggccaaggaagtatggaccggacgggactgttgtagcgttatctcctaaaccgatttcatcagcgccggcgccgtcgcatcttccgccgccgagttcacacgtcatcgatttctccgcttctgagaaacgtagcaaagtgaaaccaacgaactcgtttaacagaacaaagtatcatcaccaagttgagaatttgggtgaatgggctccttgctccgtcggtggtaatttcacacctcatataatcacagtcaacaccggcgaggatgtaacaatgaagataatctcgttttcgcaacaaggacctcgctctatttgtgttctgtcagcaaacggtgttatttcaagcgttacacttcgtcagccagattcctctggcggcacattgacatacgaaggtcggtttgagatattatcattatccgggtcattcatgcctaatgattcaggcggaacacgaagtagaacgggaggaatgagtgtatcgttagcaagtcccgatggacgtgtagtaggcggtggcctcgccggtttactagtagccgcgagtccggttcaggtggttgtaggaagttttttagcgggcactgaccatcaagatcagaaaccgaaaaagaacaaacatgatttcatgttgtcgagtcctaccgctgcaattcctatctctagtgcagctgatcaccggacaatccattcggtctcgtctcttccggtcaataataatacatggcagacttctttagcttccgatccaagaaacaagcataccgatattaatgtcaatgtaacttgaaatccaatctttctctgtattttctgttaacaagtttgatttggttgtttatctacattaggattttactaaaatggtagtattatttatagggttttagggtctttattttggttccactgttgtcacttgtaggata

SEQ ID NO: 368 - protein, 356 aa, Arabidopsis thaliana
  G1944
MVLNMESTGEAVRSTTGNDGGITVVRSDAPSDFHVAQRSESSNQSPTSVTPPPPQPSSHHTAPPPLQISTVTTTTTTAAMEGISGGLMKKKRGRPRKYGPDGTVVALSPKPISSAPAPSHLPPPSSHVIDFSASEKRSKVKPTNSFNRTKYHHQVENLGEWAPCSVGGNFTPHIITVNTGEDVTMKIISFSQQGPRSICVLSANGVISSVTLRQPDSSGGTLTYEGRFEILSLSGSFMPNDSGGTRSRTGGMSVSLASPDGRVVGGGLAGLLVAASPVQVVVGSFLAGTDHQDQKPKKNKHDFMLSSPTAAIPISSAADHRTIHSVSSLPVNNNTWQTSLASDPRNKHTDINVNVT

SEQ ID NO: 369 - DNA, 1878 bp, Arabidopsis thaliana
  G2787
tctcagagcaaaaaacaaaaaaaaagaaaaaaaaaccctaaatctaaatctcaccttccacctctgtcttttttttttttgttcttttttttttttttactgtatcttctcttctctttgctctgcaaaaatctcacatccatggatccatctcttggtgatcctcatcatcctcctcagttcaccccttttcctcattttcccacctccaatcatcatcctttaggaccaaatccgtacaataaccatgtcgtcttccaaccgcagccgcaaacgcaaacgcaaatcccgcaaccgcagatgtttcagttatctccacatgtttcaatgccccaccctccttactccgaaatgatttgcgctgcgattgcggcgttaaacgaaccggatggttcgagcaagatggcaatttcgagatacatcgagagatgttacaccggtttaacttctgctcatgctgctttgttgactcaccatctcaagactttgaagaccagtggtgttctttctatggttaagaaatcttacaaaattgctggttcttctactcctcctgctagtgtagctgttgctgctgctgccgccgctcaaggtctcgatgttcccagatctgagattctccattcaagtaacaacgatcccatggcttctggctctgcttctcagcctctgaaacgaggtcgtggtcgtcctcctaagcctaaacctgaatctcaaccacaaccactacagcaacttccaccgaccaatcaagtccaggctaacggacagccaatctgggaacagcagcaagttcaatcacctgttccggttccgactccggttacagagtcggcgaagagaggacctggtcgtccaaggaagaacggttctgctgctcctgctactgcaccaatcgttcaagcttcggttatggctggaattatgaaacgtagaggtagaccaccgggtcgtcgagctgctgggagacagaggaagcccaaatccgtttcttctactgcctctgtgtatccttatgttgctaatggtgctagacgcagaggaaggcctaggagagttgttgaccctagcagtattgttagtgttgctccagtaggtggtgaaaatgtggcagcggttgcgccagggatgaagcgtggacgtggacgaccacctaagattggtggtgttatcagtaggcttattatgaagcctaagagaggacgaggacgtcctgtaggtagacccagaaagattggaacatcagtcacgactgggacacaagattctggagaactcaagaagaagtttgatatttttcaagagaaagtgaaagaaattgtgaaggtgttgaaggatggagttacaagtgagaatcaagcagtggtgcaagccataaaagatctggaagcactaacagtgacggagaccgttgagccacaagttatggaagaagtgcagccagaggagactgcagcaccacagactgaagctcaacaaactgaagctgctgagacacaaggaggacaagaagaaggacaagaaagagaaggagaaacacagacccagacagaagcagaggcaatgcaagaagctctgttctgaagaataataatgatctagaaaacaacctagacataatagccttggtgtttggcgttaggagtgtttttttttagttgttttaggtgttggaatcgcatcttaaattatataaaaatctataaggaattttaatttttctaggttttgttgtctgcagaagaagaaatagtagactcgttaatggtgttgttgtcggtgtgtctttaaccaaaccataagacgtggctgtaaattagcgatgtttctagtcttccatctttaataatctcttattgcgtctgtgcctttgttttt

SEQ ID NO: 370 - protein, 480 aa, Arabidopsis thaliana
  G2787
MDPSLGDPHHPPQFTPFPHFPTSNHHPLGPNPYNNHVVFQPQPQTQTQIPQPQMFQLSPHVSMPHPPYSEMICAAIAALNEPDGSSKMAISRYIERCYTGLTSAHAALLTHHLKTLKTSGVLSMVKKSYKIAGSSTPPASVAVAAAAAAQGLDVPRSEILHSSNNDPMASGSASQPLKRGRGRPPKPKPESQPQPLQQLPPTNQVQANGQPIWEQQQVQSPVPVPTPVTESAKRGPGRPRKNGSAAPATAPIVQASVMAGIMKRRGRPPGRRAAGRQRKPKSVSSTASVYPYVANGARRRGRPRRVVDPSSIVSVAPVGGENVAAVAPGMKRGRGRPPKIGGVISRLIMKPKRGRGRPVGRPRKIGTSVTTGTQDSGELKKKFDIFQEKVKEIVKVLKDGVTSENQAVVQAIKDLEALTVTETVEPQVMEEVQPEETAAPQTEAQQTEAAETQGGQEEGQEREGETQTQTEAEAMQEALF

SEQ ID NO: 371 - DNA, 1040 bp, Arabidopsis thaliana
  G2789
ctttagggacaccaaatctattcaacctaaaagccttcttttcccctatattgaccaactttttagcgaatcagaagaggaatggatgaggtatctcgttctcatacaccgcaatttctatcaagtgatcatcagcactatcaccatcaaaacgctggacgacaaaaacgcggcagagaagaagaaggagttgaacccaacaatataggggaagacctagccacctttccttccggagaagagaatatcaagaagagaaggccacgtggcagacctgctggttccaagaacaaacccaaagcaccaatcatagtcactcgcgactccgcgaacgccttcagatgtcacgtcatggagataaccaacgcctgcgatgtaatggaaagcctagccgtcttcgctagacgccgtcagcgtggcgtttgcgtcttgaccggaaacggggccgttacaaacgtcaccgttagacaacctggcggaggcgtcgtcagtttacacggacggtttgagattctttctctctcgggttcgtttcttcctccaccggcaccaccagctgcgtctggtttaaaggtttacttagccggtggtcaaggtcaagtgatcggaggcagtgtggtgggaccgcttacggcatcaagtccggtggtcgttatggcagcttcatttggaaacgcatcttacgagaggctgccactagaggaggaggaggaaactgaaagagaaatagatggaaacgcggctagggcgattggaacgcaaacgcagaaacagttaatgcaagatgcgacatcgtttattgggtcgccgtcgaatttaattaactctgtttcgttgccaggtgaagcttattggggaacgcaacgaccgtctttctaagataatatcattgataatataagtttcgtcttcttattctttttcactttttacctttttcactttcttaggttttgttttaacgtttgattaatacctgaaggtttttggaaaattttcgatcggataaaaggatttatgttgcgagccgaaacgcggcc

SEQ ID NO: 372 - protein, 265 aa, Arabidopsis thaliana
  G2789
MDEVSRSHTPQFLSSDHQHYHHQNAGRQKRGREEEGVEPNNIGEDLATFPSGEENIKKRRPRGRPAGSKNKPKAPIIVTRDSANAFRCHVMEITNACDVMESLAVFARRRQRGVCVLTGNGAVTNVTVRQPGGGVVSLHGRFEILSLSGSFLPPPAPPAASGLKVYLAGGQGQVIGGSVVGPLTASSPVVVMAASFGNASYERLPLEEEEETEREIDGNAARAIGTQTQKQLMQDATSFIGSPSNLINSVSLPGEAYWGTQRPSF

SEQ ID NO: 373 - DNA, 826 bp, Arabidopsis thaliana; identical to SEQ ID NO: 357
  G620

SEQ ID NO: 374 - protein, 208 aa, Arabidopsis thaliana; identical to SEQ ID NO: 358
  G620

SEQ ID NO: 375 - DNA, 2868 bp, Arabidopsis thaliana
  G621
ctttgtgaacaaaacacatctcgtatacttcagatctagactcgaaaattttagacctctttacaattggtctttgttcatctgaagttggagaaaatagttagcttaggtcggatcttttcatatgctttggatcctccttcgtctcttttgtataattttaaccttatcaagagttctttttgaatctcaaaagattatatagtagtatagaaggtttatatgtatatgtatagccagatagtttatgttgtttaaagattcgatgatagccaagttgggttaactttctttttccttgcctccttactcacatacaaaccctatctgtccgtacaaaatactaaaaaccctaacttttctctctccaccaatctagtttattgtttcatttccacttcaacgatgaaaagcttgcatgtggcggccaacgccggagatctggctgaggattgtggaatactcggtggagacgctgatgatactgttttgatggatggaattgatgaagttggtagagagatctggttagatgaccatggaggagataataatcatgttcatggtcatcaagatgatgatttgattgttcatcatgacccttcaatcttctatggagatctcccaacgcttcctgatttcccatgcatgtcgtcttcatcatcgtcttcaacatctccagctcctgtcaacgcaatcgtctcctcagcctcttcttcttcggcagcttcttcctccacttcctcagctgcttcttgggctatattgagatcagatggagaagatccgactccaaaccaaaaccaatacgcatcaggaaactgtgacgactcttctggtgcattgcaatccacagcttccatggagattccattagacagcagtcaaggttttggttgcggcgaaggcggtggtgattgcattgatatgatggagactttcgggtacatggatctacttgatagcaacgagttctttgacacctcagctatatttagccaagacgacgacacgcaaaaccctaacttgatggaccaaacccttgagagacaagaagaccaggtcgttgttccgatgatggagaataacagtggtggagacatgcaaatgatgaattcttccttggaacaggacgatgatctcgctgctgtgtttttggagtggctaaagaacaacaaggagactgtgtcggctgaggatttgaggaaagtaaagataaagaaagctacgattgaatcagcggcaagaagactaggcggtggtaaagaagcgatgaagcagcttttaaagctgattcttgaatgggtccaaactaatcacttacaaagaagacgcaccaccaccaccaccaccaacctctcttatcaacaatcattccaacaagatccatttcaaaaccctaaccctaataacaacaacctaatcccaccgtccgaccaaacctgtttctcaccttcaacatgggttcctccaccaccacaacaacaagcttttgtctcggacccgggttttggatacatgcctgctccaaactatccgccacagccagagttccttcctttacttgaatctccaccgtcatggccaccaccaccacagtctggtcccatgccacatcaacaattccccatgccgccaacctcgcagtataatcaatttggagatccaacaggtttcaatggatacaacatgaatccgtaccaatatccttatgttcctgcaggacaaatgagagatcagagattactccgtttgtgttcctcagcaactaaagaggcaagaaagaaacggatggcgagacagaggaggttcttgtctcatcaccacagacataacaacaacaacaacaacaacaacaataatcagcagaaccaaacccaaatcggagaaacctgtgccgcggtggctccacaacttaaccccgtggccacaaccgccacgggagggacctggatgtattggcctaatgtcccggcagtgccgcctcaattaccgccagtgatggagactcagttacctaccatggaccgagctggctcagcttctgctatgccacgtcagcaggtggtaccagatcgccggcagggatggaaaccagaaaagaatttgcggtttctcttgcagaaagtcttgaagcaaagcgacgtgggtaacctcggaaggatcgttttgccaaaaaaagaagctgagacacacttgccggagctagaggcaagagacggcatctctctggccatggaagacatcggaacctctcgtgtttggaacatgcgctacaggttttggcctaacaacaaaagcaggatgtatctcctcgagaacaccggcgattttgtgaaaaccaatgggctccaagaaggtgatttcatagtcatatactccgacgtcaaatgtggcaaatatttgatacgaggggttaaagtaagacaaccgagcggacaaaagccggaggccccaccgtcgtcagcagctacgaagagacaaaacaagtcgcaaaggaacataaacaataactctccgtcggcgaatgtggtggtcgcttcaccaacttctcaaactgttaaatgaaaaacagagacaaaaagaaacaatataaatattattatgtaccaaataagaaagagggcaaaaggaaaaaatggcagcgtacccgagtgtgccacttctcgtgcatgcatgggatcttgaagacaaatggagggtcatgattaaagctgtttggtcagggtccgggtttttactccattttttgccttttcttgtcgagtcggttcttttataactctttactctttttaccttcaggatattgtagagatgattaattctggaaatggtgtttgtgttataaaaaaaaaaaaaaaaaaa

SEQ ID NO: 376 - protein, 720 aa, Arabidopsis thaliana
  G621
MKSLHVAANAGDLAEDCGILGGDADDTVLMDGIDEVGREIWLDDHGGDNNHVHGHQDDDLIVHHDPSIFYGDLPTLPDFPCMSSSSSSSTSPAPVNAIVSSASSSSAASSSTSSAASWAILRSDGEDPTPNQNQYASGNCDDSSGALQSTASMEIPLDSSQGFGCGEGGGDCIDMMETFGYMDLLDSNEFFDTSAIFSQDDDTQNPNLMDQTLERQEDQVVVPMMENNSGGDMQMMNSSLEQDDDLAAVFLEWLKNNKETVSAEDLRKVKIKKATIESAARRLGGGKEAMKQLLKLILEWVQTNHLQRRRTTTTTTNLSYQQSFQQDPFQNPNPNNNNLIPPSDQTCFSPSTWVPPPPQQQAFVSDPGFGYMPAPNYPPQPEFLPLLESPPSWPPPPQSGPMPHQQFPMPPTSQYNQFGDPTGFNGYNMNPYQYPYVPAGQMRDQRLLRLCSSATKEARKKRMARQRRFLSHHHRHNNNNNNNNNNQQNQTQIGETCAAVAPQLNPVATTATGGTWMYWPNVPAVPPQLPPVMETQLPTMDRAGSASAMPRQQVVPDRRQGWKPEKNLRFLLQKVLKQSDVGNLGRIVLPKKEAETHLPELEARDGISLAMEDIGTSRVWNMRYRFWPNNKSRMYLLENTGDFVKTNGLQEGDFIVIYSDVKCGKYLIRGVKVRQPSGQKPEAPPSSAATKRQNKSQRNINNNSPSANVVVASPTSQTVK

SEQ ID NO: 377 - DNA, 1257 bp, Arabidopsis thaliana
  G1014
cacaaaccacagtctctctttctctctctatctatcttctctttctctctctatctctatcactgaaacccaaagagatccaccatttgttcttttttccttcacacagagaactgttttcttccacacttcctttttactaggcagtgttaaccaattgagagagaaaaatgatggttgatgaaaatgtggaaaccaaggcctctactttagtggcaagtgttgatcatgggtttggatccgggtcgggtcatgatcatcatgggttatcggcgtctgtgcctcttcttggtgttaactggaagaagagaaggatgcctagacagagacgatcttcttcttcctttaaccttctctctttccctcctcctatgcctcctatttcccacgtgccaactcctctccccgcacgtaaaattgacccaagaaagctaagattcctcttccaaaaggaactcaagaacagtgacgtcagctctctccgacgtatgatactcccgaagaaagccgcggaggctcacttgccggcacttgaatgcaaggaagggattcctataagaatggaagatttggacggttttcacgtttggaccttcaagtataggtactggccaaacaacaatagcagaatgtacgtgctagaaaacacaggcgattttgtgaatgctcatggtctgcagctaggtgacttcatcatggtttaccaagatctctactcaaacaattacgttatacaagcaagaaaagcatcggaagaagaagaagtagacgtaatcaatcttgaagaagacgacgtttacacaaacttaacaaggatcgaaaacactgtggttaacgatcttctcctccaagattttaatcatcacaacaacaacaacaacaacaacagcaacagcaacagcaacaaatgttcttactattatccagtcatagatgatgtcaccacaaacacagagtcttttgtctacgacacgacggctcttacctccaacgatactcctctcgattttttgggtggacatacgacgactactaataattattactccaagttcggaacattcgatggtttgggctccgttgagaatatctctctcgatgacttctactagataatcaatcgatgggctcatggtattcttgatggtgatcagctatttaatatccttataatatatataagaattaaatgcaatttgcatatatattatcaagtgttgtaatataacattacagtttaaaaaaaaaaaaaaaaaa

SEQ ID NO: 378 - protein, 312 aa, Arabidopsis thaliana
  G1014
MVDENVETKASTLVASVDHGFGSGSGHDHHGLSASVPLLGVNWKKRRMPRQRRSSSSFNLLSFPPPMPPISHVPTPLPARKIDPRKLRFLFQKELKNSDVSSLRRMILPKKAAEAHLPALECKEGIPIRMEDLDGFHVWTFKYRYWPNNNSRMYVLENTGDFVNAHGLQLGDFIMVYQDLYSNNYVIQARKASEEEEVDVINLEEDDVYTNLTRIENTVVNDLLLQDFNHHNNNNNNNSNSNSNKCSYYYPVIDDVTTNTESFVYDTTALTSNDTPLDFLGGHTTTTNNYYSKFGTFDGLGSVENISLDDFY

SEQ ID NO: 379 - DNA, 1194 bp, Arabidopsis thaliana
  G2687
ctctgtctctcgtatctttctactactctgtttcttgaattctaatgaacaacatcgacgacgcaaagacggagacttcagtgtcttcaggttcaagcgactctttcttgcctctcaagaaacgcatgagacttgatgacgaaccagaaaacgccctagtggtttcgtcttcaccaaagacggttgtggcttctggcaatgtcaagtacaaaggagtcgttcagcaacagaacggtcattggggtgcccagatttacgcagaccacaaaaggatttggcttggaactttcaaatccgctgatgaagccgccacggcttacgatagtgcatctatcaaactccgaagctttgacgctaactcgcaccggaacttcccttggtctacaatcactctcaacgaaccagactttcaaaattgctacacaacagagactgtgttgaacatgatcagagacggttcgtaccaacacaaattcagagattttctcagaatcagatctcagattgttgcgagtatcaacatcgggggaccaaaacaagcccgaggagaagtgaatcaagaatcagacaagtgtttttcttgcacacagctttttcagaaggaattgacaccgagcgatgtagggaaactaaataggcttgtgatacctaaaaagtatgcagtgaagtatatgcctttcataagcgctgatcaaagcgagaaagaagagggtgaaatagtaggatctgtggaagatgtggaggttgtgttttacgacagagcaatgagacaatggaagtttaggtattgttactggaaaagtagccagagctttgtcttcaccagaggatggaatagtttcgtgaaggagaagaatctcaaggagaaggatgttattgccttctacacttgcgatgtcccgaacaatgtgaagacattagaaggtcaaagaaagaacttcttgatgatcgatgttcattgcttttcagacaacggttccgtggtagctgaggaagtaagtatgacggttcatgacagttcagtgcaagtaaagaaaacagaaaacttggttagctccatgttagaagataaagaaaccaaatcagaggagaacaaaggagggtttatgctgtttggtgtaaggatcgaatgtccttagggaatttttctttaaaagtttcttacttcaactagaacttgttttacttgtacct

SEQ ID NO: 380 - protein, 364 aa, Arabidopsis thaliana
  G2687
MNNIDDAKTETSVSSGSSDSFLPLKKRMRLDDEPENALVVSSSPKTVVASGNVKYKGVVQQQNGHWGAQIYADHKRIWLGTFKSADEAATAYDSASIKLRSFDANSHRNFPWSTITLNEPDFQNCYTTETVLNMIRDGSYQHKFRDFLRIRSQIVASINIGGPKQARGEVNQESDKCFSCTQLFQKELTPSDVGKLNRLVIPKKYAVKYMPFISADQSEKEEGEIVGSVEDVEVVFYDRAMRQWKFRYCYWKSSQSFVFTRGWNSFVKEKNLKEKDVIAFYTCDVPNNVKTLEGQRKNFLMIDVHCFSDNGSVVAEEVSMTVHDSSVQVKKTENLVSSMLEDKETKSEENKGGFMLFGVRIECP

SEQ ID NO: 381 - DNA, 1065 bp, Arabidopsis thaliana
  G2690
atggatatggacgagatgagcaatgtagccaagacaacgacagagacttcaggcttaactgactctgtcttgagcctcacgaaacgcatgaaacctactgaggttacgaccaccacaaaacctgccttgtccaacacgacgaaattcaaaggagttgttcagcaacagaacggtcattggggtgctcagatttacgcagaccatcgaaggatttggcttggaactttcaaatccgctcatgaagccgctgctgcttacgatagcgcatcgattaagcttcgaagctttgatgctaactcgcaccggaacttcccttggtctgattttaccctccatgaaccggactttcaagagtgctacacgacagaagctgtgttgaacatgatcagagacggttcttatcaacacaagttcagagattttctcagaatccggtctcagattgttgcgaatatcaacatcgtgggatcaaaacaagtcttaggaggaggagaaggtggtcaagaatcgaacaagtgtttctcgtgcacgcagctttttcagaaagaactgacaccgagcgatgtagggaaactgaataggcttgtgatacctaagaagtatgcagtgaagtatatgcctttcataagcgatgatcaaagcgagaaagagacgagtgaaggagtagaagatgtggaggttgtcttttacgacagagcaatgagacaatggaagtttaggtattgttactggagaagtagccagagctttgtcttcaccagaggatggaatggtttcgtgaaggagaagaatctcaaggagaaagatattattgtcttttacacttgcgatgtccccaacaatgtgaagacattagaaggccaaagcaagaccttcttgatgattgatgttcatcacttttcaggcaacggtttcgtggttcccgaggaagtaaacaagacggttcatgagatttctgatgaagagatgaaaacagaaaccctctttacctcgaaggtagaagaagaaaccaaatcagaggagaagaaaggagggtttatgctgtttggtgttaggatccaatag

SEQ ID NO: 382 - protein, 354 aa, Arabidopsis thaliana
  G2690
MDMDEMSNVAKTTTETSGLTDSVLSLTKRMKPTEVTTTTKPALSNTTKFKGVVQQQNGHWGAQIYADHRRIWLGTFKSAHEAAAAYDSASIKLRSFDANSHRNFPWSDFTLHEPDFQECYTTEAVLNMIRDGSYQHKFRDFLRIRSQIVANINIVGSKQVLGGGEGGQESNKCFSCTQLFQKELTPSDVGKLNRLVIPKKYAVKYMPFISDDQSEKETSEGVEDVEVVFYDRAMRQWKFRYCYWRSSQSFVFTRGWNGFVKEKNLKEKDIIVFYTCDVPNNVKTLEGQSKTFLMIDVHHFSGNGFVVPEEVNKTVHEISDEEMKTETLFTSKVEEETKSEEKKGGFMLFGVRIQ

SEQ ID NO: 383 - DNA, 1332 bp, Arabidopsis thaliana
  G3035
gatctctctccctctctctctctctctccgggaaaaatggataacttcttaccctttccctcttctaacgcaaactctgtccaagaactctctatggatcctaacaacaatcgctcgcacttcacaacagtccctacttatgatcatcatcaggctcagcctcatcacttcttgcctccgttttcatacccggtggagcagatggcggcggtgatgaatcctcagccggtttacttatcggagtgttatcctcagatcccggttacgcaaaccggaagtgaattcggttctctggttggtaatccttgtttgtggcaagagagaggtggttttcttgatccgcgtatgacgaagatggcaaggatcaacaggaaaaacgccatgatgagatcaagaaacaactctagccctaattctagtccaagtgagttggttgattcaaagagacagctgatgatgcttaacttgaaaaataacgtgcagatctccgacaagaaagatagctaccaacagtccacatttgataacaagaagcttagggttttgtgtgagaaggaattgaagaacagcgatgttgggtcactcgggaggatagttctaccaaagagagatgcagaagcaaatcttccgaagctatctgataaagaaggaatcgttgtacagatgagagatgttttctctatgcagtcttggtctttcaaatacaagttttggtccaataacaagagcagaatgtatgtcctcgagaacacaggagaatttgtgaagcaaaatggagctgagataggagactttttaacaatatacgaggacgaaagcaagaatctctacttcgccatgaatggaaattcgggaaaacaaaatgaaggaagagaaaatgagtcgagggaaaggaaccactacgaagaggcaatgcttgattacataccaagagacgaagaggaagcttccattgcaatgctcatcggaaatctaaacgatcactatcccatccctaacgatctcatggacctcaccactgaccttcagcaccatcaagccacgtcctcaatgacacctgaggatcacgcgtacgtgggttcatccgatgatcaggtgagctttaacgactttgagtggtggtgatatggtggtggaagttctcaagttcataacccccttatgaaaatagaccttaagatatacaaaagagattaaaagaaaaaaaagttagtatatttcatcatatctctcattgaagatgagatttatatctataattgttttatatagtgtttttattacttttctatcaatatattaaagttttaattaaaaaaaaaaaaaaaaaaa

SEQ ID NO: 384 - protein, 362 aa, Arabidopsis thaliana
  G3035
MDNFLPFPSSNANSVQELSMDPNNNRSHFTTVPTYDHHQAQPHHFLPPFSYPVEQMAAVMNPQPVYLSECYPQIPVTQTGSEFGSLVGNPCLWQERGGFLDPRMTKMARINRKNAMMRSRNNSSPNSSPSELVDSKRQLMMLNLKNNVQISDKKDSYQQSTFDNKKLRVLCEKELKNSDVGSLGRIVLPKRDAEANLPKLSDKEGIVVQMRDVFSMQSWSFKYKFWSNNKSRMYVLENTGEFVKQNGAEIGDFLTIYEDESKNLYFAMNGNSGKQNEGRENESRERNHYEEAMLDYIPRDEEEASIAMLIGNLNDHYPIPNDLMDLTTDLQHHQATSSMTPEDHAYVGSSDDQVSFNDFEWW

SEQ ID NO: 385 - DNA, 1023 bp, Arabidopsis thaliana
  G6
tatctatccgagaatggccaagatgggcttgaaacccgacccggctactactaaccagacccacaataatgccaaggagattcgttacagaggcgttaggaagcgtccttggggccgttatgccgccgagatccgagatccgggcaagaaaacccgcgtctggcttggcactttcgatacggctgaagaggcggcgcgtgcttacgatacggcggcgcgtgattttcgtggtgctaaggctaagaccaatttcccaacttttctcgagctgagtgaccagaaggtccctaccggtttcgcgcgtagccctagccagagcagcacgctcgactgtgcttctcctccgacgttagttgtgccttcagcgacggctgggaatgttcccccgcagctcgagcttagtctcggcggaggaggcggcggctcgtgttatcagatcccgatgtcgcgtcctgtctactttttggacctgatggggatcggtaacgtaggtcgtggtcagcctcctcctgtgacatcggcgtttagatcgccggtggtgcatgttgcgacgaagatggcttgtggtgcccaaagcgactctgattcgtcatcggtcgttgatttcgaaggtgggatggagaagagatctcagctgttagatctagatcttaatttgcctcctccatcggaacaggcctgagcttttaacggtgtcgtttcaattcgaagcgcatgcgtttcttcttctttttgagctgtgaaaattcgttttctcatagtttttcctctctctctctctcagtctaaatttattaccagtttttagaaagaaaaaacagattaaatctgagagagaaaaatataattttagctgacatggatcgttatgtacatattattacataaccggagatctgaacttttgttgtgtgcttttaattttttgcgacttggtttcaccccatgttgtttctctattttttttactactttttttttttttgttcttccaaattttcaatcaataatttggtaatcttc

SEQ ID NO: 386 - protein, 222 aa, Arabidopsis thaliana
  G6
MAKMGLKPDPATTNQTHNNAKEIRYRGVRKRPWGRYAAEIRDPGKKTRVWLGTFDTAEEAARAYDTAARDFRGAKAKTNFPTFLELSDQKVPTGFARSPSQSSTLDCASPPTLVVPSATAGNVPPQLELSLGGGGGGSCYQIPMSRPVYFLDLMGIGNVGRGQPPPVTSAFRSPVVHVATKMACGAQSDSDSSSVVDFEGGMEKRSQLLDLDLNLPPPSEQA

SEQ ID NO: 387 - DNA, 1059 bp, Arabidopsis thaliana
  G1004
atggcgactcctaacgaagtatctgcactttggttcatcgagaaacatctactcgacgaggcttctcctgtggctacagatccatggatgaagcacgaatcatcatcagcaacagaatctagctctgactcttcttctatcatcttcggatcatcgtcctcttctttcgccccaattgatttctctgaatccgtatgcaaacctgaaatcatcgatctcgatactcccagatctatggaatttctatcgattccatttgaatttgactcagaagtttctgtttctgatttcgattttaaaccttctaatcaaaatcaaaatcagtttgaaccggagcttaaatctcaaattcgtaaaccgccattgaagatttcgcttccagctaaaacagagtggattcaattcgcagctgaaaacaccaaaccggaagttactaaaccggtttcggaagaagagaagaagcattacagaggagtaagacaaagaccgtgggggaaattcgcggcggagattcgtgacccgaataaacgcggatctcgcgtttggcttgggacgtttgatacagcgattgaagcggctagagcttatgacgaagcagcgtttagactacgaggatcgaaagcgattttgaatttccctcttgaagttgggaagtggaaaccacgcgccgatgaaggtgagaagaaacggaagagagacgatgatgagaaagtgactgtggttgagaaagtgttgaagacggaacagagcgttgacgttaacggtggagagacgtttccgtttgtaacgtcgaatttaacggaattatgtgactgggatttaacggggtttcttaactttccgcttctgtcgccgttatctcctcatccaccgtttggttattcccagttgaccgttgtttgattagttttttttgagtttttgaacgatgtgtatgctgacgtggacgtacacgtaggtgcatgcgatgaaaaaaacatctatttgttcatatttttgcgtttttctatttgttcattctttttcacaattcacaatacattatttcagttaatgatc

SEQ ID NO: 388 - protein, 300 aa, Arabidopsis thaliana
  G1004
MATPNEVSALWFIEKHLLDEASPVATDPWMKHESSSATESSSDSSSIIFGSSSSSFAPIDFSESVCKPEIIDLDTPRSMEFLSIPFEFDSEVSVSDFDFKPSNQNQNQFEPELKSQIRKPPLKISLPAKTEWIQFAAENTKPEVTKPVSEEEKKHYRGVRQRPWGKFAAEIRDPNKRGSRVWLGTFDTAIEAARAYDEAAFRLRGSKAILNFPLEVGKWKPRADEGEKKRKRDDDEKVTVVEKVLKTEQSVDVNGGETFPFVTSNLTELCDWDLTGFLNFPLLSPLSPHPPFGYSQLTVV

SEQ ID NO: 389 - DNA, 1281 bp, Arabidopsis thaliana
  G1005
gctttttgtgttgaagagagagtttcctatcttctccattcctcccaccatctccctcatcttcatcttcctctctctttctctctttctcaacaatctctattagatctttctccattaccattacctctggctttctcttaaatccaccatcatgaggagaggaagaggctcttccgccgtcgccggacctaccgtcgttgccgccatcaacggatctgtaaaagaaatcagattcagaggcgtaaggaagagaccttggggacgattcgcagctgagatccgtgatccatggaaaaaagctcgtgtttggttaggtactttcgattccgccgaagaagctgctcgcgcttacgactccgccgctcgtaacctccgtggtcctaaagccaaaactaatttccccatcgattcttcttctcctcctcctcctaatctccgatttaatcagattcgtaatcaaaatcaaaaccaagtcgatccgtttatggaccaccggttattcaccgaccatcaacaacagttcccgattgttaaccggcctactagtagcagcatgagcagcaccgttgaatcgtttagcggacccagacctacgacgatgaaaccggccacgacgaagagatatcctagaactccaccggttgttccggaggattgtcacagcgattgcgattcgtcgtcgtctgtaatcgacgacgacgacgatatcgcatcgtcttcacggcgacggaatccgccgtttcaattcgatcttaattttccaccgttggattgtgttgacttgttcaatggcgctgatgatcttcactgtaccgatctacgtctctaatgaattggtaaaatcaaactcaaaatcacagatccgtgatcggtttgattttaatcgaaaacacacaacaaaatccttttttttttttttttaaattttctgtttcgttgatctcatataatttttactatgcgggagaaatagaaagacaaagaaacgaagaagaagaagaagatggtgatgagcttgagagagcttgagctggttctgtgtttcttctgtgatgatattgtaagagtattattattttactattattactaaatcttcaaaaccaagaagaagaagaccgaacacgatgatctgttgtgtctgtttgttttactgtaagaaaaacgcagatctgggtttcgtttttttcttgagatagatcaaacaacccccatctttgtaacatatacatttggaacactcatgattctaaataaaaaatctagaatctttttttc

SEQ ID NO: 390 - protein, 225 aa, Arabidopsis thaliana
  G1005
MRRGRGSSAVAGPTVVAAINGSVKEIRFRGVRKRPWGRFAAEIRDPWKKARVWLGTFDSAEEAARAYDSAARNLRGPKAKTNFPIDSSSPPPPNLRFNQIRNQNQNQVDPFMDHRLFTDHQQQFPIVNRPTSSSMSSTVESFSGPRPTTMKPATTKRYPRTPPVVPEDCHSDCDSSSSVIDDDDDIASSSRRRNPPFQFDLNFPPLDCVDLFNGADDLHCTDLRL

SEQ ID NO: 391 - DNA, 1931 bp, Arabidopsis thaliana
  G186
ctttcaaccaaacccctaaacaaaaaaaaaatacattttctgatctctctaaaaatctttctccttcgttaatctcgtgatctctttctttttctatatatggacagaggatggtctggtctcactcttgattcatcttctcttgatcttttaaaccctaatcgtatttctcataagaatcaccgacgtttctcaaatcctttggcgatgtctagaattgacgaagaagatgatcagaagacgagaatatcaaccaacggtagtgaatttaggtttccggtgagtctctcaggtattcgtgatcgtgaagatgaagatttttcatctggcgttgctggagataatgaccgtgaagttcccggcgaagtggatttcttctccgacaagaaatctagggtttgtcgtgaagacgacgaaggatttcgtgtgaagaaggaagaacaagatgatcgaacggacgtaaataccggtttgaatcttcgaacaactggtaatacaaagagtgatgagtcaatgatcgatgatggagaatcttccgaaatggaagataagcgtgcgaaaaatgagttggtgaaattacaagatgagttgaagaaaatgacaatggataatcaaaagcttagagaattgcttacacaagttagcaacagttacacttcacttcagatgcatcttgtttcactaatgcagcaacagcaacaacagaacaataaggtaatagaagctgctgagaagcctgaggagacgatagtaccaaggcaatttattgatttaggccctacgagagcagtaggtgaggccgaggatgtgtcaaattcttcatccgaagatagaactcgttcggggggttcttctgcagccgagaggcgtagtaacgggaagagacttgggcgtgaagaaagccccgaaactgagtccaacaaaattcagaaggtgaattctactaccccgacgacatttgatcaaaccgctgaagctacgatgaggaaagcccgtgtctccgttcgtgcccgatcggaagctccgatgataagcgatggatgtcaatggagaaaatatggccagaagatggccaaagggaatccttgtccgcgggcatattaccgctgcacgatggccacgggctgtcccgttcgcaaacaagttcaacgttgcgcggaagacagatcaattctgattacaacctacgagggaaaccataaccatccgttgccgccagccgcggtagccatggcttctaccaccacggcggcggctaacatgttgctatccgggtcaatgtctagtcacgacgggatgatgaaccctacaaatttactagctagggctgttcttccttgctccacaagcatggcaacaatctcagcctccgcgccgtttccaaccgtcacattagacctcacccactcacctccgcctcctaatggttccaatccttcctcttccgcggctaccaacaacaaccacaactcactgatgcagcggccgcaacaacaacaacagcaaatgacgaacttacctccgggaatgctacctcatgtaataggccaggcattgtataaccaatccaagttctcggggctgcagttctctggtggctctccctcgacggcagcgttttctcagtcacacgcggtggctgatacaataacggcactcacagctgacccgaatttcacggcggctcttgcagccgttatttcttctatgatcaatggtacgaaccaccacgacggcgaaggaaacaacaaaaatcaatagaaaaatattacattttttttttgggtatctacattttttttccaactgggttataggaaacagagagtttatttcattgattcacatttgttctgtttcgtaccaaaatcccagtaaatatacaaaagcaaactatactcaagttcatattcgtaaacactataaatagt

SEQ ID NO: 392 - protein, 553 aa, Arabidopsis thaliana
  G186
MDRGWSGLTLDSSSLDLLNPNRISHKNHRRFSNPLAMSRIDEEDDQKTRISTNGSEFRFPVSLSGIRDREDEDFSSGVAGDNDREVPGEVDFFSDKKSRVCREDDEGFRVKKEEQDDRTDVNTGLNLRTTGNTKSDESMIDDGESSEMEDKRAKNELVKLQDELKKMTMDNQKLRELLTQVSNSYTSLQMHLVSLMQQQQQQNNKVIEAAEKPEETIVPRQFIDLGPTRAVGEAEDVSNSSSEDRTRSGGSSAAERRSNGKRLGREESPETESNKIQKVNSTTPTTFDQTAEATMRKARVSVRARSEAPMISDGCQWRKYGQKMAKGNPCPRAYYRCTMATGCPVRKQVQRCAEDRSILITTYEGNHNHPLPPAAVAMASTTTAAANMLLSGSMSSHDGMMNPTNLLARAVLPCSTSMATISASAPFPTVTLDLTHSPPPPNGSNPSSSAATNNNHNSLMQRPQQQQQQMTNLPPGMLPHVIGQALYNQSKFSGLQFSGGSPSTAAFSQSHAVADTITALTADPNFTAALAAVISSMINGTNHHDGEGNNKNQ

SEQ ID NO: 393 - DNA, 896 bp, Arabidopsis thaliana
  G1758
gtccctcctcttagcttcaaccgccggaaaaactaaacaaccttcttggaaaaaaagagaaactaaaaatgaactatccttcaaaccctaaccctagctccacagatttcactgaatttttcaagttcgatgattttgacgatacttttgagaagatcatggaagaaatcggccgtgaggaccactcgtcgtcaccgactttgagttggagttcatcggaaaagttagtggctgcagaaatcacaagcccgcttcaaacaagcctagctacctcacctatgagctttgaaataggtgacaaagatgaaatcaaaaagaggaagagacacaaagaagatccgattattcacgtcttcaaaacgaaatcatcaattgatgaaaaggttgctttagatgatgggtataaatggaggaaatacggaaagaagccgataacgggtagtccatttccaaggcattatcacaagtgttcgagcccagattgcaacgtgaagaagaagatcgaaagagatacgaacaatccagattacatattgacaacatacgaaggtagacataaccacccaagcccttctgtagtttattgtgattcagacgactttgatcttaactctctcaacaattggtcctttcagacggcaaatacgtatagtttctctcattctgctccatattgatcgatcgtagttacaagtttgtgtatatagatgtatatatatatatcaccaattcaccatcgtaatcacgtctcacatgtaactacgtacatatatcttgttcggggttcgttttgtaatgtattgaattggtggaggtagaatggaagtcatcttgtatagttgtacttgtatgtaaggtttgatagtcattttttataaagtaactaatttgtacaa

SEQ ID NO: 394 - protein, 202 aa, Arabidopsis thaliana
  G1758
MNYPSNPNPSSTDFTEFFKFDDFDDTFEKIMEEIGREDHSSSPTLSWSSSEKLVAAEITSPLQTSLATSPMSFEIGDKDEIKKRKRHKEDPIIHVFKTKSSIDEKVALDDGYKWRKYGKKPITGSPFPRHYHKCSSPDCNVKKKIERDTNNPDYILTTYEGRHNHPSPSVVYCDSDDFDLNSLNNWSFQTANTYSFSHSAPY

SEQ ID NO: 395 - DNA, 1797 bp, Arabidopsis thaliana
  G916
aaaaaaaaaaacaatctaagatatctatcaagatcttaagatatctacatttatagagatgtttcgttttccggtaagtcttggaggaggtccacgtgagaatctgaagccatcagatgagcagcatcaacgtgcggtggtgaatgaggttgactttttccgatcagcggagaagagagatagggtttcacgtgaagaacaaaacattatcgccgatgagactcatagggttcatgtcaaaagggagaattcacgtgttgatgatcatgacgatcgttctactgatcacatcaatattggacttaatcttctcactgcgaatacgggaagcgacgagtcaatggtggatgatggattgtctgtggatatggaagagaaacgtacaaagtgtgagaatgcacaacttcgcgaagagctaaagaaggcgagtgaagataatcaaagactaaagcaaatgctaagtcaaacaaccaacaacttcaattccttgcagatgcaacttgttgctgtcatgaggcaacaagaagatcatcatcacctagctacgaccgagaacaatgacaatgtaaagaaccgacatgaagtgcctgaaatggttccaagacagttcatcgatttgggaccgcattctgacgaagtgtcgtccgaggagaggacgacggttcggtcgggatctcctccctcgcttctagagaaatctagctcacgtcaaaacggaaagagagtgcttgtaagagaagaaagcccggaaaccgaatccaacggctggagaaaccctaacaaagttcctaaacaccatgcatcatccagcatttgcggtggcaatggcagtgaaaatgcaagtagcaaggtcattgagcaagcggccgccgaagccaccatgcgtaaagcccgtgtctcggttcgtgctcgatccgaagctcccatgttaagcgatggatgtcaatggagaaaatacggacaaaaaatggcgaaaggaaacccgtgccctcgagcttattaccgttgcacaatggctgttggatgtcctgttcgcaagcaagtgcaacgttgcgcggaagatagaaccattctcataacaacctacgaaggaaaccataaccatccattacctcctgcggctatgaacatggcttcaactacaacagcagccgcaagcatgcttctctcaggctccaccatgtcgaaccaagacggtttaatgaacccaacaaatctcttggctcgaaccatattaccgtgttcctcaagcatggctactatctcagcctctgcaccattcccaaccattacattagacctcacagagtcacccaacgggaacaatccaaccaataacccgctgatgcaattctctcaacggtctggtttggtggagttgaaccaatcggttttgcctcatatgatgggtcaggctttgtactacaaccaacagtctaagttttcgggtttacatatgccgtctcagccgctaaacgctggtgagagtgttagcgccgctactgccgcaatcgcctccaatcccaactttgccgcggctctagctgcagccataacttcgattatcaacggttcgaacaatcagcagaatgggaacaacaataacagtaatgttacaacgagcaacgttgacaataggcaataacatttttttataagttttagttagggactttttatcggtcgattttgttttgtttttcttttattacattattttttagttacggcttttttttgttttttcttttctttcccaaacaacaagtattgagagcaattcccccccccccccct

SEQ ID NO: 396 - protein, 528 aa, Arabidopsis thaliana
  G916
MFRFPVSLGGGPRENLKPSDEQHQRAVVNEVDFFRSAEKRDRVSREEQNIIADETHRVHVKRENSRVDDHDDRSTDHINIGLNLLTANTGSDESMVDDGLSVDMEEKRTKCENAQLREELKKASEDNQRLKQMLSQTTNNFNSLQMQLVAVMRQQEDHHHLATTENNDNVKNRHEVPEMVPRQFIDLGPHSDEVSSEERTTVRSGSPPSLLEKSSSRQNGKRVLVREESPETESNGWRNPNKVPKHHASSSICGGNGSENASSKVIEQAAAEATMRKARVSVRARSEAPMLSDGCQWRKYGQKMAKGNPCPRAYYRCTMAVGCPVRKQVQRCAEDRTILITTYEGNHNHPLPPAAMNMASTTTAAASMLLSGSTMSNQDGLMNPTNLLARTILPCSSSMATISASAPFPTITLDLTESPNGNNPTNNPLMQFSQRSGLVELNQSVLPHMMGQALYYNQQSKFSGLHMPSQPLNAGESVSAATAAIASNPNFAAALAAAITSIINGSNNQQNGNNNNSNVTTSNVDNRQ

SEQ ID NO: 397 - DNA, 438 bp, Arabidopsis thaliana
  G2688
atggagggatatgataatgggtcgttgtatgctccttttttgtcgttgaaatctcattcgaaaccagagctgcatcaaggcgaagaagagagctcaaaggttagatcagaaggttgttcgaaaagcgtggagtcgtcgaaaaagaaggggaagaaacaaaggtatgcgtttcaaacaaggagccaagtggatattcttgatgatggttatcgatggaggaaatatggccaaaaggccgtcaagaacaacaagttccctaggagttactataggtgtacatatggaggatgcaatgtgaagaagcaagtgcaaagattaacagtggaccaagaagtggtcgtgacaacctacgaaggagtgcattcgcatcccatcgagaaatccaccgaaaacttcgagcatattctcactcaaatgcaaatctactcttctttctag

SEQ ID NO: 398 - protein, 145 aa, Arabidopsis thaliana
  G2688
MEGYDNGSLYAPFLSLKSHSKPELHQGEEESSKVRSEGCSKSVESSKKKGKKQRYAFQTRSQVDILDDGYRWRKYGQKAVKNNKFPRSYYRCTYGGCNVKKQVQRLTVDQEVVVTTYEGVHSHPIEKSTENFEHILTQMQIYSSF

SEQ ID NO: 399 - DNA, 1516 bp, Arabidopsis thaliana
  G928
ctcatggcgatgttggtttcccaggaaaggtaaaagagacggagacgaaccaaaacaaggaagaaagaagaagatcttacatacgaagatcactctctgattcactctgagagacaaactggtttactttggttctgtttgacaaaaggagacatgcaaaaataaatctctatcccttgtttttcttcttcgcttcatcgattactcaaagaggttgttggttgtgagaataattagcttgttaaggaagacgttatgatgcatcagatgttgaataagaaagattcagctactcattccactttgccataccttaatactagcatctcttggggagtggttccaactgattccgttgctaatcgtcgcggtcctgctgaatcactaagcttgaaggttgattcaagacctgggcatatacaaactacaaagcaaatcagttttcaggaccaagattcatcttcaacacagtccactggtcaatcttatactgaagttgctagtagtggtgatgataatccttccagacaaatctccttttcggctaaatcaggatctgaaataactcaacggaaggggtttgcaagtaatcctaaacaaggctcgatgactggatttccgaatattcactttgctcctgcacaggctaatttctcatttcactatgctgatccacattatggtggtttattagctgcaacttacctaccacaggcaccaacatgcaatcctcaaatggtgagtatgattcctggtcgtgttcctttaccagcagagctcacagaaactgatccagtctttgtcaatgcgaagcaataccacgcaattatgaggaggagacagcaacgtgctaagcttgaggctcaaaacaaactaatcagagcccgtaagccctatcttcatgagtctcgacatgttcatgctcttaaaaggccaagaggatctggtggaagattcctaaacaccaaaaaacttcttcaagaatccgaacaggctgctgctagagaacaagaacaggacaagttaggccaacaggtaaacagaaagaccaacatgtctagattcgaagctcatatgctgcagaacaacaaagaccgcagctcaaccacttctggctcagacatcacctctgtttccgacggtgctgatatctttggacacactgaattccagttttcaggtttcccaactccgataaaccgagccatgcttgttcatggtcagtctaatgacatgcatggaggtggagacatgcaccatttctctgtccatatctgagacagtggatcttggtgctgtgttcatgttcccaccaagaaggggaagtcatccttggctactactagttctttcgcttgttgtaacttcagtgtttttatttcatattatgtctgtgttagacatcacaagaacgaccaagatcttcactttgaaacactctattaccttttcatcttctgttaccatggatctcttgtctaaactagtgatatgattcttctgataaaaaaaaaaa

SEQ ID NO: 400 - protein, 340 aa, Arabidopsis thaliana
  G928
MMHQMLNKKDSATHSTLPYLNTSISWGVVPTDSVANRRGPAESLSLKVDSRPGHIQTTKQISFQDQDSSSTQSTGQSYTEVASSGDDNPSRQISFSAKSGSEITQRKGFASNPKQGSMTGFPNIHFAPAQANFSFHYADPHYGGLLAATYLPQAPTCNPQMVSMIPGRVPLPAELTETDPVFVNAKQYHAIMRRRQQRAKLEAQNKLIRARKPYLHESRHVHALKRPRGSGGRFLNTKKLLQESEQAAAREQEQDKLGQQVNRKTNMSRFEAHMLQNNKDRSSTTSGSDITSVSDGADIFGHTEFQFSGFPTPINRAMLVHGQSNDMHGGGDMHHFSVHI

SEQ ID NO: 401 - DNA, 933 bp, Arabidopsis thaliana
  G1752
aaaaaaaaaaaaaaaaaaaaacttatggaatattcccaatcttccatgtattcatctccaagttcttggagctcatcacaagaatcactcttatggaacgagagctgtttcttggatcaatcatctgaacctcaagccttcttttgccctaattatgattactccgatgactttttctcatttgagtcaccggagatgatgattaaggaagaaattcaaaacggcgacgtttctaactccgaagaagaagaaaaggttggaattgatgaagaaagatcatacagaggagtgaggaaaaggccgtgggggaaatttgcagcggagataagagattcaacgaggaatggaattagggtttggctcgggacatttgacaaagccgaggaagccgctcttgcttatgatcaagcggctttcgccacaaaaggatctcttgcaacacttaatttcccggtggaagtggttagagagtcgctaaagaaaatggagaatgtgaatcttcatgatggaggatctccggttatggccttgaagagaaaacattctcttcgaaaccggcctagagggaaaaagcgatcctcttcttcttcttcttcttcttctaattcttcttcttgctcttcttcttcgtctacttcttcaacatcaagaagtagtagtaagcagagtgttgtgaagcaagaaagtggtacacttgtggtttttgaagatttaggtgctgagtatttagaacaacttcttatgagctcatgttgatcttgtaattgatttcagcaaaagccactattaaactttaattttgtgataattaatcttgaaatttgttttgttcattctgcaatttctttggttctcttattttttgtttgttgtatccaaatgaaattattggaagagatggtgatgttaaagtgtatatatataaaaaaaaaa

SEQ ID NO: 402 - protein, 243 aa, Arabidopsis thaliana
  G1752
MEYSQSSMYSSPSSWSSSQESLLWNESCFLDQSSEPQAFFCPNYDYSDDFFSFESPEMMIKEEIQNGDVSNSEEEEKVGIDEERSYRGVRKRPWGKFAAEIRDSTRNGIRVWLGTFDKAEEAALAYDQAAFATKGSLATLNFPVEVVRESLKKMENVNLHDGGSPVMALKRKHSLRNRPRGKKRSSSSSSSSSNSSSCSSSSSTSSTSRSSSKQSVVKQESGTLVVFEDLGAEYLEQLLMSSC

SEQ ID NO: 403 - DNA, 1740 bp, Arabidopsis thaliana
  G1818
taacaaatcaaataattagagaaataaccaaaatttaacttttagagggactacaggatttgtactttgtacattcatatattattgttatatatcgtttcatacattaatttgaaccaatgtaaattaagtaaaattcaatttaacatcatgagcaaattcttattaaaattctcttaaaattttgagcaaattatgctttcacatttaacatttgaaaacatcatttttaacaagatattcaaaactaagttttgtacagcaaaattttaactttcaattttatagagaaaaaggtatttttttttttgtttcatttttataagactattatttggtatataatatacactttaagtaaaaacaaatctctttcttttttcttcttataataccaaccacaagtctgtcagtcacacacatacagttaataacattaaatattcttaacaaactactaaataggttgagattcatatatgtaaagagatcacttcttaatcttatcctaccatatcttatatacgcttaattttcctttatatatgcaaacctccacataaaaatatctcaaacccaaacacttcaaacaaaaaaaaaatggagaacaacaacaacaaccaccaacagccaccgaaagataacgagcaactaaagagtttctggtcaaaggggatggaaggtgacttgaatgtcaagaatcacgagttccccatctctcgtatcaagaggataatgaagtttgatccggatgtgagtatgatcgctgctgaggctccaaatctcttatctaaggcttgtgaaatgtttgtcatggacctcacgatgcgttcatggctccatgctcaagagagcaaccgactcacgatacggaaatctgatgttgatgccgtagtgtctcaaaccgtcatctttgatttcttgcgtgatgatgtccctaaggacgagggagagcccgttgtcgccgctgctgatcctgtggacgatgttgctgatcatgtggctgtgccagatcttaacaatgaagaactgccgccgggaacggtgataggaactccggtttgttacggtttaggaatacacgcgccacacccgcagatgcctggagcttggaccgaggaggatgcgactggggcaaatggaggaaacggtgggaattaatatttggattgggttttgtaaccgctgttgtgagaacttgaatttctttttgagttctgcttatgttttcaatgttatgttttttagttgttgaatgtatttctgttgttttgtccaaaaaaaaaaaagaatgtatttctgttgttgtctttcaaatgaatctaatggtttatgaatattggctttagattaatttatgcatacaaaaacacaaggattacggataaaaaagtcctcagtttacccatggaaacataatcttctagtgattccttatgagagtagaaaagaatcatatattataatctatttcataagagatagggtactgtaaacaaggatgtttattcggctatttcttttttttttaatcacttttacttgtcaagactcttttgtgtttgcagctttttgttagattacattctagaggcaacaagatccagagatctagcaaaaaaaacttattttgaaacctgaatctattttaaaaattttccaactcatttttcgttcttattctttgttttccaacggaatttggcgcacaaacgatttatttgaattttgtctttcaag

SEQ ID NO: 404 - protein, 186 aa, Arabidopsis thaliana
  G1818
MENNNNNHQQPPKDNEQLKSFWSKGMEGDLNVKNHEFPISRIKRIMKFDPDVSMIAAEAPNLLSKACEMFVMDLTMRSWLHAQESNRLTIRKSDVDAVVSQTVIFDFLRDDVPKDEGEPVVAAADPVDDVADHVAVPDLNNEELPPGTVIGTPVCYGLGIHAPHPQMPGAWTEEDATGANGGNGGN

SEQ ID NO: 405 - DNA, 765 bp, Arabidopsis thaliana
  G2115
aatcactctacaaagcctgtacgtacacaacaacattaccatggtgaaacaagaacgcaagatccaaaccagcagcacaaaaaaggaaatgcctttgtcatcatcaccatcttcttcttcttcttcatcttcttcctcgtcttcgtcttcgtgtaagaacaagaacaagaagagtaagattaagaagtacaaaggagtgaggatgagaagttggggatcatgggtctctgagattagggcaccaaatcaaaagacaaggatttggttaggttcttactcaacagctgaagcagctgctagagcttacgatgttgcactcttatgtctcaaaggccctcaagccaatctcaacttccctacttcttcttcttctcatcatcttcttgataatctcttagatgaaaatacccttttgtcccccaaatccatccaaagagtagctgctcaagctgccaactcatttaaccattttgcccctacttcatcagccgtctcgtcaccgtccgatcatgatcatcaccatgatgatgggatgcaatctttgatgggatcttttgtggacaatcatgtgtctttgatggattcaacatcttcatggtatgatgatcataatgggatgttcttgtttgataatggagctccattcaattactctcctcaactaaactcgacgacgatgctcgatgaatacttctacgaagatgctgacattccgctttggagtttcaattaatccgacggtccataatacatactttaattagt

SEQ ID NO: 406 - protein, 230 aa, Arabidopsis thaliana
  G2115
MVKQERKIQTSSTKKEMPLSSSPSSSSSSSSSSSSSSCKNKNKKSKIKKYKGVRMRSWGSWVSEIRAPNQKTRIWLGSYSTAEAAARAYDVALLCLKGPQANLNFPTSSSSHHLLDNLLDENTLLSPKSIQRVAAQAANSFNHFAPTSSAVSSPSDHDHHHDDGMQSLMGSFVDNHVSLMDSTSSWYDDHNGMFLFDNGAPFNYSPQLNSTTMLDEYFYEDADIPLWSFN

SEQ ID NO: 407 - DNA, 960 bp, Arabidopsis thaliana
  G2539
atggcgattccacaaagaaacaagcgcaaagcaagatcctcgccggaacggctaacacaaccgccggaactaccacacaactccgacgttccttcttcttcgtcttcttctgccgctgataatttcttttcttggtcgacgaaacagtttgctttcccgccaggttatagatttgtaccaaaggaccaagaactcatctttcattacttgaaacccttttcgcaaggcaataaatgctcattgctcaatgttcctatccatcgtgtgaacatctacgagtcaaatccacaacatctttcagagaaatatgagaagggtaatgataaagattggttctatatatcggagaggaccaagaccggtaaggctggaagaagtaataaacgtgtcgacaatggaggatattggagcgcaactgtagctgcccaaaagatcaacgctggaaatggcatagtcggctacaagacttcactagagtactatgttgggaaacaatcaaatagtgtcaaaggggattggttaatgcaagagtactggtttgagtcttctgatgataacaacaacgagaaggtggatcatgctttgtgcaagatttatctgactccagcggcagcaaagaagaagaaagctgaggaagcagagaatgagaagctgaagaaagaagaagacgttgagcagctggatttgaatcaaccagaccaattgcagctgcaacagcctcatgatattgtgtatcaaccgcagtattgtttacttccagaacatcatcagccgcagccttttcctgataacttttctgagttgatcagctttcaacagcaaccagtgatgatcccagacgattttgaagatttcttggctgaattcactaaaccacattcactggatggagatgaagaattcaacaattatggtttgtttgaaggcttctttgacacagaaggaatgataaaacattaa

SEQ ID NO: 408 - protein, 319 aa, Arabidopsis thaliana
  G2539
MAIPQRNKRKARSSPERLTQPPELPHNSDVPSSSSSSAADNFFSWSTKQFAFPPGYRFVPKDQELIFHYLKPFSQGNKCSLLNVPIHRVNIYESNPQHLSEKYEKGNDKDWFYISERTKTGKAGRSNKRVDNGGYWSATVAAQKINAGNGIVGYKTSLEYYVGKQSNSVKGDWLMQEYWFESSDDNNNEKVDHALCKIYLTPAAAKKKKAEEAENEKLKKEEDVEQLDLNQPDQLQLQQPHDIVYQPQYCLLPEHHQPQPFPDNFSELISFQQQPVMIPDDFEDFLAEFTKPHSLDGDEEFNNYGLFEGFFDTEGMIKH

SEQ ID NO: 409 - DNA, 882 bp, Arabidopsis thaliana
  G3074
atgaggaagaagctcgatactcggttcccagctgctcgtattaaaaagattatgcaagctgatgaggatgttggcaagatagctttggcagtgcctgtcttagtctcaaaatctttggagttgttcttgcaagacctttgtgatcgtacatatgaaattacccttgaaagaggtgccaagactgtgagctcattgcacctaaaacattgtgtggaaagatataacgtgtttgattttctgagggaagttgtgagtaaggtgcctgactatggccattcccaagggcaaggacatggtgatgttaccatggatgatcgcagcatctccaagagaaggaagcccatcagcgatgaagtgaatgacagtgacgaggaatataagaaaagcaaaacgcaagagatagggagtgctaagaccagtggcaggggtggtagaggaagagggcgaggaagaggtcgtggtggacgagctgcaaaagcagccgaaagagagggtctcaaccgcgagatggaagtagaagccgccaattctggacagccaccaccagaagacaatgtcaagatgcatgcgtcagagtcatcaccacaagaggatgagaagaaaggcatcgacggcacagcagcatcgaacgaagacaccaagcaacaccttcaaagtcccaaagaaggcattgactttgatctcaacgctgaatccctcgacctaaacgagaccaaactggcaccagccacaggcacaaccacaaccacaactgcagcaacagactctgaggagtattcgggctggcctatgatggacataagcaaaatggatccagcacagcttgctagtctgggtaagaggatagacgaggatgaggaagattatgacgaagaaggctaa

SEQ ID NO: 410 - protein, 293 aa, Arabidopsis thaliana
  G3074
MRKKLDTRFPAARIKKIMQADEDVGKIALAVPVLVSKSLELFLQDLCDRTYEITLERGAKTVSSLHLKHCVERYNVFDFLREVVSKVPDYGHSQGQGHGDVTMDDRSISKRRKPISDEVNDSDEEYKKSKTQEIGSAKTSGRGGRGRGRGRGRGGRAAKAAEREGLNREMEVEAANSGQPPPEDNVKMHASESSPQEDEKKGIDGTAASNEDTKQHLQSPKEGIDFDLNAESLDLNETKLAPATGTTTTTTAATDSEEYSGWPMMDISKMDPAQLASLGKRIDEDEEDYDEEG

SEQ ID NO: 411 - DNA, 444 bp, Arabidopsis thaliana
  G3930
attttttttgtttctctcataatatttgtgttcatactgtttcgctgtttccagtacatactaatggataacacaaaccgtcttcgccgccttcactgtcataaacaacccaagttcactcatagctctcaagaagtgagtagtatgaaatgggagtttatcaatatgaccgaacaagaagaagatctcatctttagaatgtacagacttgttggcgacaggtgggatttaatagcaagaagagtggtgggacgtgaggcaaaggagatagagagatactggattatgagaaattgtgactatttctcccacaaatgacgcaaaagtcactctctttaaaaaatctcgagaatctccctgtttttctatttctcatcctcattaaataatttctgtgattgtggacaagaaaagctttattaagttgtcgagtggggttctcct

SEQ ID NO: 412 - protein, 84 aa, Arabidopsis thaliana
  G3930
MDNTNRLRRLHCHKQPKFTHSSQEVSSMKWEFINMTEQEEDLIFRMYRLVGDRWDLIARRVVGREAKEIERYWIMRNCDYFSHK

SEQ ID NO: 413 - DNA, 1364 bp, Flaveria trinervia
  G3859
aagaaaaccctttgaaaatttcaagattctttgtttggaacatcaaattatggacctaaaacaccccaccacccacaccccacctcattcccactcaacaaacctcttaacctccaccaacggcaaacaccaccaccaccaccaccacccgccgccgcacacggcggtggcatacaaacaatgcctcaagaaccacgccgtcggcatcggttgccacgccgtagacggctgcggtgagttcatgccggctccgacgtacaacccatcacagccatcatccttcaaatgcgccgcctgtggctgccaccgcaacttccaccgccgtgaacccaccatcgccaccaggacccacttcatagacttccaccatcaccacccctcaacctccgcctccttatctccgccgtcgccagcgcctgaactgactaacttcgccgtcggaccgcatctgctgctgtcactcggcacggcggcggagcaaaaccacatggtggcgacgccggagacgccggcggcgatcaagattagtgggaggaaacggtttcggactaaattcagtcaagatcaaaaggaaaagatgttaacttttgcagagaaagtggggtggaagttgcagaggtgtgatgataagatggttgcagatttttgcagtgagattggaatcagaagaagagttttgaaagtttggatgcataataataagaacacttcagccaaaaaagaacaagaaaccaccgccaccgccaccgtcgtcaccaccgccatcaccgtcgccaccggcgtcgactccgccggagtacgtagtgatgatcaagaaaacgggtcgtctttttcatcttaactctgtaaaatctccaaattaaccctttttatggtaaatcgagcaaaccccactaattattaatcatctctctccaaattttcagttattttgaggtgaaatcggttgttaatttatgttcttcctgtaaatatggagcctttaaacaatggttgcatttggtcagagaattaaagaccagatgacccaaattttgaaaataaattcttcaattttagctcatcgggtagatgaatttgatgaagtttgactgattcaaagttgagatggtcaaaataagcaattatgtgttctaaagcattaatggaggttttggtactatttgcagagaagtaatgaatacaacaaacttgcttgtggttgttggcatttagattttggagtagcttttgagattaaccctaatctttgttcttcatatactttaatcattgtttattgtttaatatttaattaagtattctatttgtagaaagttgtttaggttatggcttatcgtttatcttaagtcttgcgattaccc

SEQ ID NO: 414 - protein, 263 aa, Flaveria trinervia
  G3859
MDLKHPTTHTPPHSHSTNLLTSTNGKHHHHHHHPPPHTAVAYKQCLKNHAVGIGCHAVDGCGEFMPAPTYNPSQPSSFKCAACGCHRNFHRREPTIATRTHFIDFHHHHPSTSASLSPPSPAPELTNFAVGPHLLLSLGTAAEQNHMVATPETPAAIKISGRKRFRTKFSQDQKEKMLTFAEKVGWKLQRCDDKMVADFCSEIGIRRRVLKVWMHNNKNTSAKKEQETTATATVVTTAITVATGVDSAGVRSDDQENGSSFSS

SEQ ID NO: 415 - DNA, 1162 bp, Flaveria bidentis
  G3668
gttttttttttttttttttttttttttttttttgtcaaagcagaacagaattgcatacgtaggtaacattgcatacacttgcacactctaaacacacacttttgctttattatttttttttgcaggcgatgggttaattcatgtccacaccctcttctttcacttatcctctgatcaacctcacatcacccaccattgcctctccatcttattcaccatcattcatcctaatctgtttcttaattcacctctcgttgttaatcacatcggagcttataattcactaatggagtttgatgaacacgatgagcaggaagaggaggtcggaattcagctcactccggggagttttgacgccgtcgggaactccggccggaggaaatccggtggcggtggcggtggcggtggatacaggtataaggaatgtttgaagaaccacgcggtaggcattggcggtcaggcggtggacggatgtggagagtttatggctgccggagatgaaggtaccttagatgcactaaagtgcgccgcgtgcaattgtcaccggaacttccatcggaaggaggtggagggacaacaacggcagcatcaacaccagcagcaagctgcgttacagcaccagtatatcaccgcgacgccgtactaccaccaccaccaccggccgacgggatacctgcacatgaaaccgcctccgtcgtcgctccaccagcggcagctggctctcccgtcgacgtctcgagatgatctggatgagatctcaaaccctagctccagcggtggcggtggcgttggtggaagcggttcgaagaagagattccgaacgaaattcacacaggatcagaaggatcggatgctggcgttctcggaggcgttagggtggcgtattcagaagcacgatgaggccgccgtgcaacaattctgcaacgaaaccggcgttaaacgccacgttcttaaggtctggatgcacaataataagcacacaatcggtaagaaaccctaattttgcaacaaaaacgaacaagctacagaaattattaatggaatctcattcgtaggatcgatttcagtgtcgtttaggtagtatttttgtttgatttctatcgttgtgatcgtagtctcttaatttaactcgatctgaatgttgattaatcgtttgatttcc

SEQ ID NO: 416 - protein, 237 aa, Flaveria bidentis
  G3668
MEFDEHDEQEEEVGIQLTPGSFDAVGNSGRRKSGGGGGGGGYRYKECLKNHAVGIGGQAVDGCGEFMAAGDEGTLDALKCAACNCHRNFHRKEVEGQQRQHQHQQQAALQHQYITATPYYHHHHRPTGYLHMKPPPSSLHQRQLALPSTSRDDLDEISNPSSSGGGGVGGSGSKKRFRTKFTQDQKDRMLAFSEALGWRIQKHDEAAVQQFCNETGVKRHVLKVWMHNNKHTIGKKP

SEQ ID NO: 417 - DNA, 1320 bp, Flaveria bidentis
  G3860
ctctaacccctttcttccttccatttccatatatggaccactaaccatttccccttaattattattcatggacataccatcaccaccaccaacaaccaccaccaccaccatcaccaccgccaccgccaccagccccgtcaaagatcttgacccagatgcccggatccaacccaatcaacacctcccaccgccgttcaccaacggcgtcctcaagcggctgaagccccgccaccaccagcagcagcagcagcagcagccggtggtggtgagttaccgagagtgtttaaagaaccacgccgcggccatgggcggacatgcggtggatggatgcggtgagtttatgccgtcgccgtcgtcaagtccgaccgacccgacgtcgttaaaatgtgcagcctgcggttgccaccgtaacttccaccgccgtgaccccgacggaccgtttccggccaacccaccggtgcaacacgtgatagaatacaaacctcaccaccgccaccaccctccaccaccgccaccgctaccaattcccctcgccggagttagagaaaacagcgtcagtccggcggattccccatctccaccgccgatctcctcctcctactacccatcagccccacacatgctcttagctctcagctccggcctaccggcaccaccgtcggaaaacgcccaattctccccaattccgatctccggcggcgtaatcgggtcaaactccgccggaaaaaaacgattccgaacgaaattcactcaagatcagaaggagaaaatgcacgagttagcagaacgagttgggtggaagatgcagaagaaagatgaagacttgattatcggattctgcaacgaaatcggagttgataaaggggttttcaaggtgtggatgcataacaacaagatgacgtttggaggtaagaaagattccgacaaccacctagccggaaatgggtcctccggtggtggtcttgatttcttcaacagaaacaaccaccagcaacagcagcagcaacaaccgcagaacaacgacagcgttacgagtggtggtggtgggaatgctatcggaactaatggttcatcatcgtcgtcttaaactcttgattaatcttgattattattatggataataagcctttatttaaatagagatagcaagagagaagaagaatatgaggctgttgtttgttttttcgttttagttaattatatattagaagctttttgttgattaaataattagttaatctttgtttaatccaaatgtggaaagatgtagttgtagtactgctagattttcatgcaataatactatgtttagaaactctc

SEQ ID NO: 418 - protein, 339 aa, Flaveria bidentis
  G3860
MDIPSPPPTTTTTTITTATATSPVKDLDPDARIQPNQHLPPPFTNGVLKRLKPRHHQQQQQQQPVVVSYRECLKNHAAAMGGHAVDGCGEFMPSPSSSPTDPTSLKCAACGCHRNFHRRDPDGPFPANPPVQHVIEYKPHHRHHPPPPPPLPIPLAGVRENSVSPADSPSPPPISSSYYPSAPHMLLALSSGLPAPPSENAQFSPIPISGGVIGSNSAGKKRFRTKFTQDQKEKMHELAERVGWKMQKKDEDLIIGFCNEIGVDKGVFKVWMHNNKMTFGGKKDSDNHLAGNGSSGGGLDFFNRNNHQQQQQQQPQNNDSVTSGGGGNAIGTNGSSSSS

SEQ ID NO: 419 - DNA, 967 bp, Flaveria bidentis
  G3861
gtttatgccgtcgccggcggcaactccggccgaccccacgtcgatcaaatgcgctgcctgcggctgccaccgtaacttccaccgccgtgaacccgacgcatcgtttccgatcaacccatcgccaccggtgcagcacgttatagactaccaaccccaccaccgccaccacccaccgccaccacaaccaccaccaccaccgcggccgatctccgtcgccggagtattggaaaccagtgtaagtccgccggattccccatctccaccgccaatctcctcctcttacatgctgttagccctcagctctggcttatcagccccaccgccggagatcacccacaacccccaaatctccaccggaatcggagcaattggagcaaattccaccggaaaaaagcgatttcggacgaaattcactcaagatcagaagcaaaagatgcacgaattggcggaacgtgtgggatggaagatgcagaagaaagatgaagatctgattatcaatttctgcaacgaaattggggtcgataaaggggttttcaaggtgtggatgcataataacaagatgacgtccgccggaaaaaaagactccgcccaccagctcgttgacagtggatcctccggcgccggcggtggcggcggtggtggtgatttcttgatgagtagaaactaccaccacctacagcagcagcagaataatgatagtggtagcagcggtggtggcggtggtggtggtgatggtggtggtgatgttatcggaactaatggttcatcgtcatcttcttaattaatcatgattatggataataactaataagcgcttgtttaagtagatatagcaagagagaagaacaagggtatgaggctgttgtttttttttatttattaattttggttacttatgttagaatctttttttgttgattatttaattagttgatccttgtttaatccaaataaggaaagttctagt

SEQ ID NO: 420 - protein, 258 aa, Flaveria bidentis
  G3861
MPSPAATPADPTSIKCAACGCHRNFHRREPDASFPINPSPPVQHVIDYQPHHRHHPPPPQPPPPPRPISVAGVLETSVSPPDSPSPPPISSSYMLLALSSGLSAPPPEITHNPQISTGIGAIGANSTGKKRFRTKFTQDQKQKMHELAERVGWKMQKKDEDLIINFCNEIGVDKGVFKVWMHNNKMTSAGKKDSAHQLVDSGSSGAGGGGGGGDFLMSRNYHHLQQQQNNDSGSSGGGGGGGDGGGDVIGTNGSSSSS

SEQ ID NO: 421 - DNA, 1246 bp, Artificial Sequence
  Artificial sequence
  P167
gtgtttcttctttctgctaaaaggttataatttttgtttcttggtttggtgagaatcttcaagaaactgaaacaaagaaaatggattctagttgcatagacgagataagttcctccacttcagaatctttctccgccaccaccgccaagaagctctctcctcctcccgcggcggcgttacgcctctaccggatgggaagcggcgggagcagcgtcgtgttggatcccgagaacggcctagagacggagtcacgaaagctaccatcttcaaaatacaaaggtgttgttcctcagcctaacggaagatggggagctcagatctacgagaagcaccaacgagtatggctcgggactttcaacgagcaagaagaagctgctcgttcctacgacatcgcagcttgtagattccgtggccgcgacgccgtcgtcaacttcaagaacgttctggaagacggcgatttagcttttcttgaagctcactcaaaggccgagatcgtcgacatgttgagaaaacacacttacgccgacgagcttgaacagaacaataaacggcagttgtttctctccgtcgacgctaacggaaaacgtaacggatcgagtactactcaaaacgacaaagttttaaagacgtgtgaagttcttttcgagaaggctgttacacctagcgacgttgggaagctaaaccgtctcgtgatacctaaacaacacgccgagaaacactttccgttaccgtcaccgtcaccggcagtgactaaaggagttttgatcaacttcgaagacgttaacggtaaagtgtggaggttccgttactcatactggaacagtagtcaaagttacgtgttgaccaagggatggagtcgattcgtcaaggagaagaatcttcgagccggtgatgttgttactttcgagagatcgaccggactagagcggcagttatatattgattggaaagttcggtctggtccgagagaaaacccggttcaggtggtggttcggcttttcggagttgatatctttaatgtgaccaccgtgaagccaaacgacgtcgtggccgtttgcggtggaaagagatctcgagatgttgatgatatgtttgcgttacggtgttccaagaagcaggcgataatcaatgctttgtgacatatttccttttccgattttatgctttcgttttttaatttttttttttgtcaagttgtgtaggttgtgattcatgctaggttgtatttaggaaaagagataagacc

SEQ ID NO: 422 - DNA, 1246 bp, Artificial Sequence; identical to SEQ ID NO: 421
  Artificial sequence
  P7824

SEQ ID NO: 423 - DNA, 1055 bp, Artificial Sequence
  Artificial sequence
  P1
ataaaggcatttcagctccaccgtaggaaactttctcttgaaagaaacccacagcaacaaacagagaaaatgtgtggcggtgctattatttccgattatgcccctctcgtcaccaaggccaagggccgtaaactcacggctgaggaactctggtcagagctcgatgcttccgccgccgacgacttctggggtttctattccacctccaaactccatcccaccaaccaagttaacgtgaaagaggaggcagtgaagaaggagcaggcaacagagccggggaaacggaggaagaggaagaatgtttatagagggatacgtaagcgtccatggggaaaatgggcggctgagattcgagatccacgaaaaggtgttagagtttggcttggtacgttcaacacggcggaggaagctgccatggcttatgatgttgcggccaagcagatccgtggtgataaagccaagctcaacttcccagatctgcaccatcctcctcctcctaattatactcctccgccgtcatcgccacgatcaaccgatcagcctccggcgaagaaggtctgcgttgtctctcagagtgagagcgagttaagtcagccgagtttcccggtggagtgtataggatttggaaatggggacgagtttcagaacctgagttacggatttgagccggattatgatctgaaacagcagatatcgagcttggaatcgttccttgagctggacggtaacacggcggagcaaccgagtcagcttgatgagtccgtttccgaggtggatatgtggatgcttgatgatgtcattgcgtcgtatgagtaaaagaaaaaaaataagtttaaaaaaagttaaataaagtctgtaatatatatgtaaccgccgttacttttaaaaggtttttaccgtcgcattggactgctgatgatgtctgttgtgtaatgtgtagaatgtgaccaaatggacgttatattacggtttgtggtattattagtttcttagatggaaaaacttacatgtgtaaataagatttgtaatgtaagacgaagtacttataacttctt

SEQ ID NO: 424 - DNA, 907 bp, Artificial Sequence
  Artificial sequence
  P806
ctcatacacaactacttatctcttcacttcattagtctccaagaagaaaacatctctcactctctaaaatacacactctcatcaaaaaccttctcttcggttcagaagcattcaagaatccattatgagctcatctgattccgttaataacggcgttaactcacggatgtacttccgtaacccgagtttcagcaacgttatcttaaacgataactggagcgacttgccgttaagtgtcgacgattctcaagacatggctatttacaacactctccgtgatgccgttagctccggctggacaccctccgttcctcccgttacctctccggcggaggaaaataagcctccggcgacgaaggcgagtggctcacacgcgccgaggcagaaggggatgcagtacagaggagtgaggaggaggccgtgggggaaattcgcggcggagattagggatccgaagaagaacggagctagggtttggctcgggacttacgagacgccggaggacgcggcggtggcgtacgaccgagcggcgtttcagctcagaggatcgaaagctaagctgaattttccgcatttgattggttcttgtaagtatgagccggttaggattaggcctcgccgtcgctcgccggaaccgtcagtctccgatcagttaacgtcggagcagaagagggaaagccacgtggatgacggcgagtctagtttggttgtaccggagttggatttcacggtggatcagttttacttcgatggtagtttattaatggaccaatcagaatgttcttattctgataatcggatataattagttttaagattaagcaaaatttgtccaacgagttttgctgtatgaaatatctatcgatgactcaacaggttttgatcatgatcatatgtaatgtgatgg

SEQ ID NO: 425 - DNA, 1981 bp, Artificial Sequence
  Artificial sequence
  P25649
ggtcctagattgtaatcatcaccttatatcacttatacatatgattaacgaacaagcatgagattagtctttattcatttcattagaacatgtagctgggaactacatgaacaaaaaatccccacatttcataacaaaaaagaaaagccaagtcctagggaatagggatcatataggtaaaacgataaaaggttatactatgatacacttttttcatttatacgttaattaatgactggattagtgttttctctataatcttctcagctatagtatttaactaattaaacaaggaatagtttctacagtgattttctttaaataaagacttatgttgaaagaaatcaaaatagtaaaccatagttgaaacaaaacatccattttaataacacatttcgtctttttaatgtccaaagcagccatcagccatgtggattaattggtgctttatgataagactccaaatcgttgcgtaggacgttggtcttattattactccacttgatttttgattaagccgactttaacgggcttttccacaaggcatcacctacttgtgccttggcccattatcaaaaaacctagtagaatattctcacgtcatctttcccacgtatatgtgcacgacgtttttgttattttgtacgtaaacaagaggactggcgtttttatattccgataattaaaatactgaatataattatttaaacgatttgcatttgtctgtgtagagatgttgttgcaacgaaaggaacgattagagagaataaaacgaaagtcgcaattaagaaaacgtgtctttgacagtcacagtgggtcgacttaacctttcgacgtcagacttaacaatattttattacattcagcacgtgaaaattgcgttgtttccgattagttttatttttttaatgggagttgcttattaatgttttaaatttggagggatttatactttattcctgaaaaaacataaacgaagaatgaatctaatcttttgtttattggtgagtaactaactacctatattcaatttcataccggaaaattttgtattatgtactaatatactttgttagactcgtcgttaacgactaaacgaatcttgtaattttccatagctttcttgacttccactgttgtattgcgcgtttcaagtgttttcaataacttatatttgctcttctctctctctctctctctctcttttttgttgttgttgttgttcactttgatgaatcttgacaaagtttacaaagttgactctatttaagcaaccaatggcaaaagatgatcgagtgaaaacctattatgtgtatatagcactaaacattatttgattaacatccaaagatatatatgagtttatacagtttcttagtttttaaatcggtggattcttttttaacaaaaaaggtttaagatcttgtagattgatttttgttcgtcaaaaaactttattatagatggatttttggtgagtacagataggccacaaaaagtgaatttaactaatttcttaatcagttatttaaaatcgtcaagtatatatggattatcattttataatgatttgggttacaaaatatcaaagaacagccaacaacaaaaaaagaaatcgaagaacaagatcatctatagaaaaaaagacaaatattactgaaaaagaaagaccaaagaccaaaagtccaaacaaaaataaataactaatatttttgtcgctgttctattttaagaacgaggcaaaaaaagaacagaaaaaaagaagaaaacgaatcttctaagaacgtaacaactatcatcaaatcaaaacctcaaagaaccttccatggactttctctcattccatacctttataaactcatacacaactacttatctcttcacttcattagtctccaagaagaaaacatctctcactctctaaaatacacactctcatcaaaaaccttctcttcggttcagaagcattcaagaatccatt

SEQ ID NO: 426 - DNA, 1981 bp, Artificial Sequence
  Artificial sequence
  P25648
ggtcctagattgtaatcatcaccttatatcacttatacatatgattaacgaacaagcatgagattagtctttattcatttcattagaacatgtagctgggaactacatgaacaaaacatccccacatttcataacaaaaaagaaaagccaagtcctagggaatagggatcatataggtaaaacgataaaaggttatactatgatacacttttttcatttatacgttaattaatgactggattagtgttttctctataatcttctcagctatagtatttaactaattaaacaaggaatagtttctacagtgattttctttaaataaagacttatgttgaaagaaatcaaaatagtaaaccatagttgaaacaaaacatccattttaataacacatttcgtctttttaatgtccaaagcagccatcagccatgtggattaattggtgctttatgataagactccaaatcgttgcgtaggacgttggtcttattattactccacttgatttttgattaagccgactttaacgggcttttccacaaggcatcacctacttgtgccttggcccattatcaaaaaacctagtagaatattctcacgtcatctttcccacgtatatgtgcacgacgtttttgttattttgtacgtaaacaagaggactggcgtttttatattccgataattaaaatactgaatataattatttaaacgatttgcatttgtctgtgtagagatgttgttgcaacgaaaggaacgattagagagaataaaacgaaagtcgcaattaagaaaacgtgtctttgacagtcacagtgggtcgacttaacctttcgacgtcagacttaacaatattttattacattcagcacgtgaaaattgcgttgtttccgattagttttatttttttaatgggagttgcttattaatgttttaaatttggagggatttatactttattcctgaaaaaacataaacgaagaatgaatctaatcttttgtttattggtgagtaactaactacctatattcaatttcataccggaaaattttgtattatgtactaatatactttgttagactcgtcgttaacgactaaacgaatcttgtaattttccatagctttcttgacttccactgttgtattgcgcgtttcaagtgttttcaataacttatatttgctcttctctctctctctctctctctcttttttgttgttgttgttgttcactttgatgaatcttgacaaagtttacaaagttgactctatttaagcaaccaatggcaaaagatgatcgagtgaaaacctattatgtgtatatagcactaaacattatttgattaacatccaaagatatatatgagtttatacagtttcttagtttttaaatcggtggattcttttttaacaaaaaaggtttaagatcttgtagattgatttttgttcgtcaaaaaactttattatagatggatttttggtgagtacagataggccacaaaaagtgaatttaactaatttcttaatcagttatttaaaatcgtcaagtatatatggattatcattttataatgatttgggttacaaaatatcaaagaacagccaacaacaaaaaaagaaatcgaagaacaagatcatctatagaaaaaaagacaaatattactgaaaaagaaagaccaaagaccaaaagtccaaacaaaaataaataactaatatttttgtcgctgttctattttaagaacgaggcaaaaaaagaacagaaaaaaagaagaaaacgaatcttctaagaacgtaacaactatcatcaaatcaaaacctcaaagaaccttccatggactttctctcattccatacctttataaactcatacacaactacttatctcttcacttcattagtctccaagaagaaaacatctctcactctctaaaatacacactctcatcaaaaaccttctcttcggttcagaagcattcaagaatccatt

SEQ ID NO: 427 - DNA, 1710 bp, Artificial Sequence
  Artificial sequence
  P21202
gttatgtcgatgacggcggattctcaatctgattatgcttttcttgagtccatacgacgacacttactaggagaatcggagccgatactcagtgagtcgacagcgagttcggttactcaatcttgtgtaaccggtcagagcattaaaccggtgtacggacgaaaccctagctttagcaaactgtatccttgcttcaccgagagctggggagatttgccgttgaaagaaaacgattctgaggatatgttagtttacggtatcctcaacgacgcctttcacggcggttgggagccgtcttcttcgtcttccgacgaagatcgtagctctttcccgagtgttaagatcgagactccggagagtttcgcggcggtggattctgttccggtcaagaaggagaagacgagtcctgtttcggcggcggtgacggcggcgaagggaaagcattatagaggagtgagacaaaggccgtgggggaaatttgcggcggagattagagatccggcgaagaacggagctagggtttggttaggaacgtttgagacggcggaggacgcggcgttggcttacgacagagctgctttcaggatgcgtggttcccgcgctttgttgaattttccgttgagagttaattcaggagaacccgacccggttcgaatcaagtccaagagatcttctttttcttcttctaacgagaacggagctccgaagaagaggagaacggtggccgccggtggtggaatggataagggattgacggtgaagtgcgaggttgttgaagtggcacgtggcgatcgtttattggttttagcggccgctgaagctcgaaaaacaaagaaaaaaatcaaagggattcagcaagccactgcaggagtctcacaagacacttcggaaaatcctaacaaaacaatagttcctgcagcattaccacagctcacccctaccttggtgtcactgctggaggtgattgaacccgaggtgttgtatgcaggatatgatagctctgttccagattcagcatggagaattatgaccacactcaacatgttaggtgggcgtcaagtgattgcagcagtgaaatgggcaaaggcgataccaggcttcagaaacttacacctggatgaccaaatgaccctgctacagtactcatggatgtttctcatggcatttgccctgggttggagatcatacagacaatcaagtggaaacctgctctgctttgctcctgatctgattattaatgagcagagaatgtctctaccctgcatgtatgaccaatgtaaacacatgctgtttgtctcctctgaattacaaagattgcaggtatcctatgaagagtatctctgtatgaaaaccttactgcttctctcctcagttcctaaggaaggtctgaagagccaagagttatttgatgagattcgaatgacttatatcaaagagctaggaaaagccatcgtcaaaagggaagggaactccagtcagaactggcaacggttttaccaactgacaaagcttctggactccatgcatgaggtggttgagaatctccttacctactgcttccagacatttttggataagaccatgagtattgaattcccagagatgttagctgaaatcatcactaatcagataccaaaatattcaaatggaaatatcaaaaagcttctgtttcatcaaaaatctagacaggcctcgtaccggatcctctag

SEQ ID NO: 428 - DNA, 1871 bp, Artificial Sequence
  Artificial sequence
  P21277
gttatgtcgatgacggcggattctcaatctgattatgcttttcttgagtccatacgacgacacttactaggagaatcggagccgatactcagtgagtcgacagcgagttcggttactcaatcttgtgtaaccggtcagagcattaaaccggtgtacggacgaaaccctagctttagcaaactgtatccttgcttcaccgagagctggggagatttgccgttgaaagaaaacgattctgaggatatgttagtttacggtatcctcaacgacgcctttcacggcggttgggagccgtcttcttcgtcttccgacgaagatcgtagctctttcccgagtgttaagatcgagactccggagagtttcgcggcggtggattctgttccggtcaagaaggagaagacgagtcctgtttcggcggcggtgacggcggcgaagggaaagcattatagaggagtgagacaaaggccgtgggggaaatttgcggcggagattagagatccggcgaagaacggagctagggtttggttaggaacgtttgagacggcggaggacgcggcgttggcttacgacagagctgctttcaggatgcgtggttcccgcgctttgttgaattttccgttgagagttaattcaggagaacccgacccggttcgaatcaagtccaagagatcttctttttcttcttctaacgagaacggagctccgaagaagaggagaacggtggccgccggtggtggaatggataagggattgacggtgaagtgcgaggttgttgaagtggcacgtggcgatcgtttattggttttagcggccgctgaagctcgaaaaacaaagaaaaaaatcaaagggattcagcaagccactgcaggagtctcacaagacacttcggaaaatcctaacaaaacaatagttcctgcagcattaccacagctcacccctaccttggtgtcactgctggaggtgattgaacccgaggtgttgtatgcaggatatgatagctctgttccagattcagcatggagaattatgaccacactcaacatgttaggtgggcgtcaagtgattgcagcagtgaaatgggcaaaggcgataccaggcttcagaaacttacacctggatgaccaaatgaccctgctacagtactcatggatgtttctcatggcatttgccctgggttggagatcatacagacaatcaagtggaaacctgctctgctttgctcctgatctgattattaatgagcagagaatgtctctaccctgcatgtatgaccaatgtaaacacatgctgtttgtctcctctgaattacaaagattgcaggtatcctatgaagagtatctctgtatgaaaaccttactgcttctctcctcagttcctaaggaaggtctgaagagccaagagttatttgatgagattcgaatgacttatatcaaagagctaggaaaagccatcgtcaaaagggaagggaactccagtcagaactggcaacggttttaccaactgacaaagcttctggactccatgcatgaggtggttgagaatctccttacctactgcttccagacatttttggataagaccatgagtattgaattcccagagatgttagctgaaatcatcactaatcagataccaaaatattcaaatggaaatatcaaaaagcttctgtttcatcaaaaatctagttacccatacgatgttcctgactatgcgggctatccctatgacgtcccggactatgcaggatcctatccatatgacgttccagattacgcttctagatacccatacgatgttcctgactatgcgggctatccctatgacgtcccggactatgcaggatcctatccatatgacgttccagattacgc

SEQ ID NO: 429 - DNA, 1780 bp, Artificial Sequence
  Artificial sequence
  P21208
aaatgaaccttgaagctcgaaaaacaaagaaaaaaatcaaagggattcagcaagccactgcaggagtctcacaagacacttcggaaaatcctaacaaaacaatagttcctgcagcattaccacagctcacccctaccttggtgtcactgctggaggtgattgaacccgaggtgttgtatgcaggatatgatagctctgttccagattcagcatggagaattatgaccacactcaacatgttaggtgggcgtcaagtgattgcagcagtgaaatgggcaaaggcgataccaggcttcagaaacttacacctggatgaccaaatgaccctgctacagtactcatggatgtttctcatggcatttgccctgggttggagatcatacagacaatcaagtggaaacctgctctgctttgctcctgatctgattattaatgagcagagaatgtctctaccctgcatgtatgaccaatgtaaacacatgctgtttgtctcctctgaattacaaagattgcaggtatcctatgaagagtatctctgtatgaaaaccttactgcttctctcctcagttcctaaggaaggtctgaagagccaagagttatttgatgagattcgaatgacttatatcaaagagctaggaaaagccatcgtcaaaagggaagggaactccagtcagaactggcaacggttttaccaactgacaaagcttctggactccatgcatgaggtggttgagaatctccttacctactgcttccagacatttttggataagaccatgagtattgaattcccagagatgttagctgaaatcatcactaatcagataccaaaatattcaaatggaaatatcaaaaagcttctgtttcatcaaaaaggtacctcgatgacggcggattctcaatctgattatgcttttcttgagtccatacgacgacacttactaggagaatcggagccgatactcagtgagtcgacagcgagttcggttactcaatcttgtgtaaccggtcagagcattaaaccggtgtacggacgaaaccctagctttagcaaactgtatccttgcttcaccgagagctggggagatttgccgttgaaagaaaacgattctgaggatatgttagtttacggtatcctcaacgacgcctttcacggcggttgggagccgtcttcttcgtcttccgacgaagatcgtagctctttcccgagtgttaagatcgagactccggagagtttcgcggcggtggattctgttccggtcaagaaggagaagacgagtcctgtttcggcggcggtgacggcggcgaagggaaagcattatagaggagtgagacaaaggccgtgggggaaatttgcggcggagattagagatccggcgaagaacggagctagggtttggttaggaacgtttgagacggcggaggacgcggcgttggcttacgacagagctgctttcaggatgcgtggttcccgcgctttgttgaattttccgttgagagttaattcaggagaacccgacccggttcgaatcaagtccaagagatcttctttttcttcttctaacgagaacggagctccgaagaagaggagaacggtggccgccggtggtggaatggataagggattgacggtgaagtgcgaggttgttgaagtggcacgtggcgatcgtttattggttttataattttgatttttctttgttggatgattatatgattcttcaaaaaagaagaacgttaataaaaaaattcgtttattattaaaaaaaaaaaaaaaagg

SEQ ID NO: 430 - DNA, 2103 bp, Artificial Sequence
  Artificial sequence
  P21283
atgaaccttgaagctcgaaaaacaaagaaaaaaatcaaagggattcagcaagccactgcaggagtctcacaagacacttcggaaaatcctaacaaaacaatagttcctgcagcattaccacagctcacccctaccttggtgtcactgctggaggtgattgaacccgaggtgttgtatgcaggatatgatagctctgttccagattcagcatggagaattatgaccacactcaacatgttaggtgggcgtcaagtgattgcagcagtgaaatgggcaaaggcgataccaggcttcagaaacttacacctggatgaccaaatgaccctgctacagtactcatggatgtttctcatggcatttgccctgggttggagatcatacagacaatcaagtggaaacctgctctgctttgctcctgatctgattattaatgagcagagaatgtctctaccctgcatgtatgaccaatgtaaacacatgctgtttgtctcctctgaattacaaagattgcaggtatcctatgaagagtatctctgtatgaaaaccttactgcttctctcctcagttcctaaggaaggtctgaagagccaagagttatttgatgagattcgaatgacttatatcaaagagctaggaaaagccatcgtcaaaagggaagggaactccagtcagaactggcaacggttttaccaactgacaaagcttctggactccatgcatgaggtggttgagaatctccttacctactgcttccagacatttttggataagaccatgagtattgaattcccagagatgttagctgaaatcatcactaatcagataccaaaatattcaaatggaaatatcaaaaagcttctgtttcatcaaaaaggtacctcgatgacggcggattctcaatctgattatgcttttcttgagtccatacgacgacacttactaggagaatcggagccgatactcagtgagtcgacagcgagttcggttactcaatcttgtgtaaccggtcagagcattaaaccggtgtacggacgaaaccctagctttagcaaactgtatccttgcttcaccgagagctggggagatttgccgttgaaagaaaacgattctgaggatatgttagtttacggtatcctcaacgacgcctttcacggcggttgggagccgtcttcttcgtcttccgacgaagatcgtagctctttcccgagtgttaagatcgagactccggagagtttcgcggcggtggattctgttccggtcaagaaggagaagacgagtcctgtttcggcggcggtgacggcggcgaagggaaagcattatagaggagtgagacaaaggccgtgggggaaatttgcggcggagattagagatccggcgaagaacggagctagggtttggttaggaacgtttgagacggcggaggacgcggcgttggcttacgacagagctgctttcaggatgcgtggttcccgcgctttgttgaattttccgttgagagttaattcaggagaacccgacccggttcgaatcaagtccaagagatcttctttttcttcttctaacgagaacggagctccgaagaagaggagaacggtggccgccggtggtggaatggataagggattgacggtgaagtgcgaggttgttgaagtggcacgtggcgatcgtttattggttttatgcggccgctctagttacccatacgatgttcctgactatgcgggctatccctatgacgtcccggactatgcaggatcctatccatatgacgttccagattacgcttctagatacccatacgatgttcctgactatgcgggctatccctatgacgtcccggactatgcaggatcctatccatatgacgttccagattacgctactagttacccatacgatgttcctgactatgcgggctatccctatgacgtcccggactatgcaggatcctatccatatgacgttccagattacgcttctagatacccatacgatgttcctgactatgcgggctatccctatgacgtcccggactatgcaggatcctatccatatgacgttccagattacgctactagacaggcctcgtaccggatcctctag

SEQ ID NO: 431 - DNA, 1250 bp, Artificial Sequence
  Artificial sequence
  P21196
atgcccaattttaatcaaagtgggaatattgctgatagctcattgtccttcactttcactaacagtagcaacggtccgaacctcataacaactcaaacaaattctcaagcgctttcacaaccaattgcctcctctaacgttcatgataacttcatgaataatgaaatcacggctagtaaaattgatgatggtaataattcaaaaccactgtcacctggttggacggaccaaactgcgtataacgcgtttggaatcactacagggatgtttaataccactacaatggatgatgtatataactatctattcgatgatgaagataccccaccaaacccaaaaaaagagggtacctcgatgacggcggattctcaatctgattatgcttttcttgagtccatacgacgacacttactaggagaatcggagccgatactcagtgagtcgacagcgagttcggttactcaatcttgtgtaaccggtcagagcattaaaccggtgtacggacgaaaccctagctttagcaaactgtatccttgcttcaccgagagctggggagatttgccgttgaaagaaaacgattctgaggatatgttagtttacggtatcctcaacgacgcctttcacggcggttgggagccgtcttcttcgtcttccgacgaagatcgtagctctttcccgagtgttaagatcgagactccggagagtttcgcggcggtggattctgttccggtcaagaaggagaagacgagtcctgtttcggcggcggtgacggcggcgaagggaaagcattatagaggagtgagacaaaggccgtgggggaaatttgcggcggagattagagatccggcgaagaacggagctagggtttggttaggaacgtttgagacggcggaggacgcggcgttggcttacgacagagctgctttcaggatgcgtggttcccgcgctttgttgaattttccgttgagagttaattcaggagaacccgacccggttcgaatcaagtccaagagatcttctttttcttcttctaacgagaacggagctccgaagaagaggagaacggtggccgccggtggtggaatggataagggattgacggtgaagtgcgaggttgttgaagtggcacgtggcgatcgtttattggttttataattttgatttttctttgttggatgattatatgattcttcaaaaaagaagaacgttaataaaaaaattcgtttattattaaaaaaaaaaaaaaaaaa

SEQ ID NO: 432 - DNA, 717 bp, Artificial Sequence
  Artificial sequence
  P25444
atgcccaattttaatcaaagtgggaatattgctgatagctcattgtccttcactttcactaacagtagcaacggtccgaacctcataacaactcaaacaaattctcaagcgctttcacaaccaattgcctcctctaacgttcatgataacttcatgaataatgaaatcacggctagtaaaattgatgatggtaataattcaaaaccactgtcacctggttggacggaccaaactgcgtataacgcgtttggaatcactacagggatgtttaataccactacaatggatgatgtatataactatctattcgatgatgaagataccccaccaaacccaaaaaaagagaagcattatagaggagtgagacaaaggccgtgggggaaatttgcggcggagattagagatccggcgaagaacggagctagggtttggttaggaacgtttgagacggcggaggacgcggcgttggcttacgacagagctgctttcaggatgcgtggttcccgcgctttgttgaattttccgttgagagttaattcaggagaacccgacccggttcgaatcaagtccaagagatcttctttttcttcttctaacgagaacggagctccgaagaagaggagaacggtggccgccggtggtggaatggataagggattgacggtgaagtgcgaggttgttgaagtggcacgtggcgatcgtttattggttttataa

SEQ ID NO: 433 - DNA, 964 bp, Artificial Sequence; identical to SEQ ID NO: 147
  Artificial sequence
  P174

SEQ ID NO: 434 - DNA, 1161 bp, Artificial Sequence
  Artificial sequence
  P21143
gttatgtcgatgacggcggattctcaatctgattatgcttttcttgagtccatacgacgacacttactaggagaatcggagccgatactcagtgagtcgacagcgagttcggttactcaatcttgtgtaaccggtcagagcattaaaccggtgtacggacgaaaccctagctttagcaaactgtatccttgcttcaccgagagctggggagatttgccgttgaaagaaaacgattctgaggatatgttagtttacggtatcctcaacgacgcctttcacggcggttgggagccgtcttcttcgtcttccgacgaagatcgtagctctttcccgagtgttaagatcgagactccggagagtttcgcggcggtggattctgttccggtcaagaaggagaagacgagtcctgtttcggcggcggtgacggcggcgaagggaaagcattatagaggagtgagacaaaggccgtgggggaaatttgcggcggagattagagatccggcgaagaacggagctagggtttggttaggaacgtttgagacggcggaggacgcggcgttggcttacgacagagctgctttcaggatgcgtggttcccgcgctttgttgaattttccgttgagagttaattcaggagaacccgacccggttcgaatcaagtccaagagatcttctttttcttcttctaacgagaacggagctccgaagaagaggagaacggtggccgccggtggtggaatggataagggattgacggtgaagtgcgaggttgttgaagtggcacgtggcgatcgtttattggttttagaattccccaattttaatcaaagtgggaatattgctgatagctcattgtccttcactttcactaacagtagcaacggtccgaacctcataacaactcaaacaaattctcaagcgctttcacaaccaattgcctcctctaacgttcatgataacttcatgaataatgaaatcacggctagtaaaattgatgatggtaataattcaaaaccactgtcacctggttggacggaccaaactgcgtataacgcgtttggaatcactacagggatgtttaataccactacaatggatgatgtatataactatctattcgatgatgaagataccccaccaaacccaaaaaaagagtagtaa

SEQ ID NO: 435 - DNA, 537 bp, Artificial Sequence
  Artificial sequence
  P25443
atgcacggcggttgggagccgtcttcttcgtcttccgacgaagatcgtagctctttcccgagtgttaagatcgagactccggagagtttcgcggcggtggattctgttccggtcaagaaggagaagacgagtcctgtttcggcggcggtgacggcggcgaagggaaagcattatagaggagtgagacaaaggccgtgggggaaatttgcggcggagattagagatccggcgaagaacggagctagggtttggttaggaacgtttgagacggcggaggacgcggcgttggcttacgacagagctgctttcaggatgcgtggttcccgcgctttgttgaattttccgttgagagttaattcaggagaacccgacccggttcgaatcaagtccaagagatcttctttttcttcttctaacgagaacggagctccgaagaagaggagaacggtggccgccggtggtggaatggataagggattgacggtgaagtgcgaggttgttgaagtggcacgtggcgatcgtttattggttttataa

SEQ ID NO: 436 - DNA, 981 bp, Artificial Sequence
  Artificial sequence
  P25678
gtcgacccacgcgtccggaaatctcaacaagaaccaaaccaaacaacaaaaaaacattcttaataattatctttctgttatgtcgatgacggcggattctcaatctgattatgcttttcttgagtccatacgacgacacttactaggagaatcggagccgatactcagtgagtcgacagcgagttcggttactcaatcttgtgtaaccggtcagagcattaaaccggtgtacggacgaaaccctagctttagcaaactgtatccttgcttcgacgagagctggggagatttgccgttgaaagaaaacgattctgaggatatgttagtttacggtatcctcaacgacgcctttcacggcggttgggagccgtcttcttcgtcttccgacgaagatcgtagctctttcccgagtgttaagatcgagactccggagagtttcgcggcggtggattctgttccggtcaagaaggagaagacgagtcctgtttcggcggcggtgacggcggcgaagggaaagcattatagaggagtgagacaaaggccgtgggggaaatttgcggcggagattagagatccggcgaagaacggagctagggtttggttaggaacgtttgagacggcggaggacgcggcgttggcttacgacagagctgctttcaggatgcgtggttcccgcgctttgttgaattttccgttgagagttaattcaggagaacccgacccggttcgaatcaagtccaagagatcttctttttcttcttctaacgagaacggagctccgaagaagaggagaacggtggccgccggtggtggaatggataagggattgacggtgaagtgcgaggttgttgaagtggcacgtggcgatcgtttattggttttataattttgatttttctttgttggatgattatatgattcttcaaaaaagaagaacgttaataaaaaaattcgtttattattaaaaaaaaaaaaaaaaaa

SEQ ID NO: 437 - DNA, 981 bp, Artificial Sequence
  Artificial sequence
  P25679
gtcgacccacgcgtccggaaatctcaacaagaaccaaaccaaacaacaaaaaaacattcttaataattatctttctgttatgtcgatgacggcggattctcaatctgattatgcttttcttgagtccatacgacgacacttactaggagaatcggagccgatactcagtgagtcgacagcgagttcggttactcaatcttgtgtaaccggtcagagcattaaaccggtgtacggacgaaaccctagctttagcaaactgtatccttgcttcaccgagagctggggagatttgccgttgaaagaaaacgattctgaggatatgttagtttacggtatcctcaacgacgcctttcacggcggttgggagccgtcttcttcgtcttccgacgaagatcgtagctctttcccgagtgttaagatcgagactccggagagtttcgcggcggtggattctgttccggtcaagaaggagaagacgagtcctgtttcggcggcggtgacggcggcgaagggaaagcattatagaggagtgagacaaaggccgtgggggaaatttgcggcggagattagagatccggcgaagaacggagctagggtttggttaggagattttgagacggcggaggacgcggcgttggcttacgacagagctgctttcaggatgcgtggttcccgcgctttgttgaattttccgttgagagttaattcaggagaacccgacccggttcgaatcaagtccaagagatcttctttttcttcttctaacgagaacggagctccgaagaagaggagaacggtggccgccggtggtggaatggataagggattgacggtgaagtgcgaggttgttgaagtggcacgtggcgatcgtttattggttttataattttgatttttctttgttggatgattatatgattcttcaaaaaagaagaacgttaataaaaaaattcgtttattattaaaaaaaaaaaaaaaaaa

SEQ ID NO: 438 - DNA, 981 bp, Artificial Sequence
  Artificial sequence
  P25680
gtcgacccacgcgtccggaaatctcaacaagaaccaaaccaaacaacaaaaaaacattcttaataattatctttctgttatgtcgatgacggcggattctcaatctgattatgcttttcttgagtccatacgacgacacttactaggagaatcggagccgatactcagtgagtcgacagcgagttcggttactcaatcttgtgtaaccggtcagagcattaaaccggtgtacggacgaaaccctagctttagcaaactgtatccttgcttcaccgagagctggggagatttgccgttgaaagaaaacgattctgaggatatgttagtttacggtatcctcaacgacgcctttcacggcggttgggagccgtcttcttcgtcttccgacgaagatcgtagctctttcccgagtgttaagatcgagactccggagagtttcgcggcggtggattctgttccggtcaagaaggagaagacgagtcctgtttcggcggcggtgacggcggcgaagggaaagcattatagaggagtgagacaaaggccgtgggggaaatttgcggcggagattagagatccggcgaagaacggagctagggtttggttaggaacgtttgaggatgcggaggacgcggcgttggcttacgacagagctgctttcaggatgcgtggttcccgcgctttgttgaattttccgttgagagttaattcaggagaacccgacccggttcgaatcaagtccaagagatcttctttttcttcttctaacgagaacggagctccgaagaagaggagaacggtggccgccggtggtggaatggataagggattgacggtgaagtgcgaggttgttgaagtggcacgtggcgatcgtttattggttttataattttgatttttctttgttggatgattatatgattcttcaaaaaagaagaacgttaataaaaaaattcgtttattattaaaaaaaaaaaaaaaaaa

SEQ ID NO: 439 - DNA, 981 bp, Artificial Sequence
  Artificial sequence
  P25681
gtcgacccacgcgtccggaaatctcaacaagaaccaaaccaaacaacaaaaaaacattcttaataattatctttctgttatgtcgatgacggcggattctcaatctgattatgcttttcttgagtccatacgacgacacttactaggagaatcggagccgatactcagtgagtcgacagcgagttcggttactcaatcttgtgtaaccggtcagagcattaaaccggtgtacggacgaaaccctagctttagcaaactgtatccttgcttcgacgagagctggggagatttgccgttgaaagaaaacgattctgaggatatgttagtttacggtatcctcaacgacgcctttcacggcggttgggagccgtcttcttcgtcttccgacgaagatcgtagctctttcccgagtgttaagatcgagactccggagagtttcgcggcggtggattctgttccggtcaagaaggagaagacgagtcctgtttcggcggcggtgacggcggcgaagggaaagcattatagaggagtgagacaaaggccgtgggggaaatttgcggcggagattagagatccggcgaagaacggagctagggtttggttaggagattttgagacggcggaggacgcggcgttggcttacgacagagctgctttcaggatgcgtggttcccgcgctttgttgaattttccgttgagagttaattcaggagaacccgacccggttcgaatcaagtccaagagatcttctttttcttcttctaacgagaacggagctccgaagaagaggagaacggtggccgccggtggtggaatggataagggattgacggtgaagtgcgaggttgttgaagtggcacgtggcgatcgtttattggttttataattttgatttttctttgttggatgattatatgattcttcaaaaaagaagaacgttaataaaaaaattcgtttattattaaaaaaaaaaaaaaaaaa

SEQ ID NO: 440 - DNA, 981 bp, Artificial Sequence
  Artificial sequence
  P25682
gtcgacccacgcgtccggaaatctcaacaagaaccaaaccaaacaacaaaaaaacattcttaataattatctttctgttatgtcgatgacggcggattctcaatctgattatgcttttcttgagtccatacgacgacacttactaggagaatcggagccgatactcagtgagtcgacagcgagttcggttactcaatcttgtgtaaccggtcagagcattaaaccggtgtacggacgaaaccctagctttagcaaactgtatccttgcttcgacgagagctggggagatttgccgttgaaagaaaacgattctgaggatatgttagtttacggtatcctcaacgacgcctttcacggcggttgggagccgtcttcttcgtcttccgacgaagatcgtagctctttcccgagtgttaagatcgagactccggagagtttcgcggcggtggattctgttccggtcaagaaggagaagacgagtcctgtttcggcggcggtgacggcggcgaagggaaagcattatagaggagtgagacaaaggccgtgggggaaatttgcggcggagattagagatccggcgaagaacggagctagggtttggttaggaacgtttgaggatgcggaggacgcggcgttggcttacgacagagctgctttcaggatgcgtggttcccgcgctttgttgaattttccgttgagagttaattcaggagaacccgacccggttcgaatcaagtccaagagatcttctttttcttcttctaacgagaacggagctccgaagaagaggagaacggtggccgccggtggtggaatggataagggattgacggtgaagtgcgaggttgttgaagtggcacgtggcgatcgtttattggttttataattttgatttttctttgttggatgattatatgattcttcaaaaaagaagaacgttaataaaaaaattcgtttattattaaaaaaaaaaaaaaaaaa

SEQ ID NO: 441 - DNA, 981 bp, Artificial Sequence
  Artificial sequence
  P25683
gtcgacccacgcgtccggaaatctcaacaagaaccaaaccaaacaacaaaaaaacattcttaataattatctttctgttatgtcgatgacggcggattctcaatctgattatgcttttcttgagtccatacgacgacacttactaggagaatcggagccgatactcagtgagtcgacagcgagttcggttactcaatcttgtgtaaccggtcagagcattaaaccggtgtacggacgaaaccctagctttagcaaactgtatccttgcttcaccgagagctggggagatttgccgttgaaagaaaacgattctgaggatatgttagtttacggtatcctcaacgacgcctttcacggcggttgggagccgtcttcttcgtcttccgacgaagatcgtagctctttcccgagtgttaagatcgagactccggagagtttcgcggcggtggattctgttccggtcaagaaggagaagacgagtcctgtttcggcggcggtgacggcggcgaagggaaagcattatagaggagtgagacaaaggccgtgggggaaatttgcggcggagattagagatccggcgaagaacggagctagggtttggttaggagattttgaggatgcggaggacgcggcgttggcttacgacagagctgctttcaggatgcgtggttcccgcgctttgttgaattttccgttgagagttaattcaggagaacccgacccggttcgaatcaagtccaagagatcttctttttcttcttctaacgagaacggagctccgaagaagaggagaacggtggccgccggtggtggaatggataagggattgacggtgaagtgcgaggttgttgaagtggcacgtggcgatcgtttattggttttataattttgatttttctttgttggatgattatatgattcttcaaaaaagaagaacgttaataaaaaaattcgtttattattaaaaaaaaaaaaaaaaaa

SEQ ID NO: 442 - DNA, 865 bp, Artificial Sequence
  Artificial sequence
  P25684
taataaatatctttctgttatgtcgatgacggcggattctcaatctgattatgcttttcttgagtccatacgacgacacttactaggagaatcggagccgatactcagtgagtcgacagcgagttcggttactcaatcttgtgtaaccggtcagagcattaaaccggtgtacggacgaaaccctagctttagcaaactgtatccttgcttcgacgagagctggggagatttgccgttgaaagaaaacgattctgaggatatgttagtttacggtatcctcaacgacgcctttcacggcggttgggagccgtcttcttcgtcttccgacgaagatcgtagctctttcccgagtgttaagatcgagactccggagagtttcgcggcggtggattctgttccggtcaagaaggagaagacgagtcctgtttcggcggcggtgacggcggcgaagggaaagcattatagaggagtgagacaaaggccgtgggggaaatttgcggcggagattagagatccggcgaagaacggagctagggtttggttaggagattttgaggatgcggaggacgcggcgttggcttacgacagagctgctttcaggatgcgtggttcccgcgctttgttgaattttccgttgagagttaattcaggagaacccgacccggttcgaatcaagtccaagagatcttctttttcttcttctaacgagaacggagctccgaagaagaggagaacggtggccgccggtggtggaatggataagggattgacggtgaagtgcgaggttgttgaagtggcacgtggcgatcgtttattggttttataattttgatttttctttgttggatgattatatgattcttca

SEQ ID NO: 443 - DNA, 735 bp, Artificial Sequence
  Artificial sequence
  P25442
tcggagccgatactcagtgagtcgacagcgagttcggttactcaatcttgtgtaaccggtcagagcattaaaccggtgtacggacgaaaccctagctttagcaaactgtatccttgcttcaccgagagctggggagatttgccgttgaaagaaaacgattctgaggatatgttagtttacggtatcctcaacgacgcctttcacggcggttgggagccgtcttcttcgtcttccgacgaagatcgtagctctttcccgagtgttaagatcgagactccggagagtttcgcggcggtggattctgttccggtcaagaaggagaagacgagtcctgtttcggcggcggtgacggcggcgaagggaaagcattatagaggagtgagacaaaggccgtgggggaaatttgcggcggagattagagatccggcgaagaacggagctagggtttggttaggaacgtttgagacggcggaggacgcggcgttggcttacgacagagctgctttcaggatgcgtggttcccgcgctttgttgaattttccgttgagagttaattcaggagaacccgacccggttcgaatcaagtccaagagatcttctttttcttcttctaacgagaacggagctccgaagaagaggagaacggtggccgccggtggtggaatggataagggattgacggtgaagtgcgaggttgttgaagtggcacgtggcgatcgtttattggttttataa

SEQ ID NO: 444 - DNA, 814 bp, Artificial Sequence
  Artificial sequence
  P23541
ctgttatgtcgatgacggcggattctcaatctgattatgcttttcttgagtccatacgacgacacttactaggagaatcggagccgatactcagtgagtcgacagcgagttcggttactcaatcttgtgtaaccggtcagagcattaaaccggtgtacggacgaaaccctagctttagcaaactgtatccttgcttcaccgagagctggggagatttgccgttgaaagaaaacgattctgaggatatgttagtttacggtatcctcaacgacgcctttcacggcggttgggagccgtcttcttcgtcttccgacgaagatcgtagctctttcccgagtgttaagatcgagactccggagagtttcgcggcggtggattctgttccggtcaagaaggagaagacgagtcctgtttcggcggcggtgacggcggcgaagggaaagcattatagaggagtgagacaaaggccgtgggggaaatttgcggcggagattagagatccggcgaagaacggagctagggtttggttaggaacgtttgagacggcggaggacgcggcgttggcttacgacagagctgctttcaggatgcgtggttcccgcgctttgttgaattttccgttgagagttaattcaggagaacccgacccggttcgaatcaagtccaagagatcttctttttcttcttctaacgagaacggagctccgaagaagaggagaacggtggccgccggtggtggaatggataagggattgacggtgaagtgcgaggttgttgaagtggcacgtggcgatcgtttattggttttataatt

SEQ ID NO: 445 - DNA, 980 bp, Artificial Sequence
  Artificial sequence
  P23317
tcgacccacgcgtccggaaatctcaacaagaaccaaaccaaacaacaaaaaaacattcttaataattatctttctgttatgtcgatgacggcggattctcaatctgattatgcttttcttgagtccatacgacgacacttactaggagaatcggagccgatactcagtgagtcgacagcgagttcggttactcaatcttgtgtaaccggtcagagcattaaaccggtgtacggacgaaaccctagctttagcaaactgtatccttgcttcaccgagagctggggagatttgccgttgaaagaaaacgattctgaggatatgttagtttacggtatcctcaacgacgcctttcacggcggttgggagccgtcttcttcgtcttccgacgaagatcgtagctctttcccgagtgttaagatcgagactccggagagtttcgcggcggtggattctgttccggtcaagaaggagaagacgagtcctgtttcggcggcggtgacggcggcgaagggaaagcattatagaggagtgagacaaaggccgtgggggaaatttgcggcggagattagagatccggcgaagaacggagctagggtttggttaggaacgtttgagacggcggaggacgcggcgttggcttacgacagagctgctttcaggatgcgtggttcccgcgctttgttgaattttccgttgagagttaattcaggagaacccgacccggttcgaatcaagtccaagagatcttctttttcttcttctaacgagaacggagctccgaagaagaggagaacggtggccgccggtggtggaatggataagggattgacggtgaagtgcgaggttgttgaagtggcacgtggcgatcgtttattggttttataattttgatttttctttgttggatgattatatgattcttcaaaaaagaagaacgttaataaaaaaattcgtttattattaaaaaaaaaaaaaaaaaa

SEQ ID NO: 446 - DNA, 821 bp, Artificial Sequence
  Artificial sequence
  P23441
tcgagctgttatgtcgatgacggcggattctcaatctgattatgcttttcttgagtccatacgacgacacttactaggagaatcggagccgatactcagtgagtcgacagcgagttcggttactcaatcttgtgtaaccggtcagagcattaaaccggtgtacggacgaaaccctagctttagcaaactgtatccttgcttcaccgagagctggggagatttgccgttgaaagaaaacgattctgaggatatgttagtttacggtatcctcaacgacgcctttcacggcggttgggagccgtcttcttcgtcttccgacgaagatcgtagctctttcccgagtgttaagatcgagactccggagagtttcgcggcggtggattctgttccggtcaagaaggagaagacgagtcctgtttcggcggcggtgacggcggcgaagggaaagcattatagaggagtgagacaaaggccgtgggggaaatttgcggcggagattagagatccggcgaagaacggagctagggtttggttaggaacgtttgagacggcggaggacgcggcgttggcttacgacagagctgctttcaggatgcgtggttcccgcgctttgttgaattttccgttgagagttaattcaggagaacccgacccggttcgaatcaagtccaagagatcttctttttcttcttctaacgagaacggagctccgaagaagaggagaacggtggccgccggtggtggaatggataagggattgacggtgaagtgcgaggttgttgaagtggcacgtggcgatcgtttattggttttataattgc

SEQ ID NO: 447 - DNA, 814 bp, Artificial Sequence; identical to SEQ ID NO: 444
  Artificial sequence
  P23543

SEQ ID NO: 448 - DNA, 949 bp, Artificial Sequence
  Artificial sequence
  P7826
gaaatctcaacaagaaccaaaccaaacaacaaaaaaacattcttaataattatctttctgttatgtcgatgacggcggattctcaatctgattatgcttttcttgagtccatacgacgacacttactaggagaatcggagccgatactcagtgagtcgacagcgagttcggttactcaatcttgtgtaaccggtcagagcattaaaccggtgtacggacgaaaccctagctttagcaaactgtatccttgcttcaccgagagctggggagatttgccgttgaaagaaaacgattctgaggatatgttagtttacggtatcctcaacgacgcctttcacggcggttgggagccgtcttcttcgtcttccgacgaagatcgtagctctttcccgagtgttaagatcgagactccggagagtttcgcggcggtggattctgttccggtcaagaaggagaagacgagtcctgtttcggcggcggtgacggcggcgaagggaaagcattatagaggagtgagacaaaggccgtgggggaaatttgcggcggagattagagatccggcgaagaacggagctagggtttggttaggaacgtttgagacggcggaggacgcggcgttggcttacgacagagctgctttcaggatgcgtggttcccgcgctttgttgaattttccgttgagagttaattcaggagaacccgacccggttcgaatcaagtccaagagatcttctttttcttcttctaacgagaacggagctccgaagaagaggagaacggtggccgccggtggtggaatggataagggattgacggtgaagtgcgaggttgttgaagtggcacgtggcgatcgtttattggttttataattttgatttttctttgttggatgattatatgattcttcaaaaaagaagaacgttaataaaaaaattcgtttattattaaa

SEQ ID NO: 449 - DNA, 1252 bp, Artificial Sequence
  Artificial sequence
  P25937
gttatgtcgatgacggcggattctcaatctgattatgcttttcttgagtccatacgacgacacttactaggagaatcggagccgatactcagtgagtcgacagcgagttcggttactcaatcttgtgtaaccggtcagagcattaaaccggtgtacggacgaaaccctagctttagcaaactgtatccttgcttcaccgagagctggggagatttgccgttgaaagaaaacgattctgaggatatgttagtttacggtatcctcaacgacgcctttcacggcggttgggagccgtcttcttcgtcttccgacgaagatcgtagctctttcccgagtgttaagatcgagactccggagagtttcgcggcggtggattctgttccggtcaagaaggagaagacgagtcctgtttcggcggcggtgacggcggcgaagggaaagcattatagaggagtgagacaaaggccgtgggggaaatttgcggcggagattagagatccggcgaagaacggagctagggtttggttaggaacgtttgagacggcggaggacgcggcgttggcttacgacagagctgctttcaggatgcgtggttcccgcgctttgttgaattttccgttgagagttaattcaggagaacccgacccggttcgaatcaagtccaagagatcttctttttcttcttctaacgagaacggagctccgaagaagaggagaacggtggccgccggtggtggaatggataagggattgacggtgaagtgcgaggttgttgaagtggcacgtggcgatcgtttattggttttagcggccgcggctgccgccgcagccgctgctagttacccatacgatgttcctgactatgcgggctatccctatgacgtcccggactatgcaggatcctatccatatgacgttccggattacgcttctagatacccatacgatgttcctgactatgcgggctatccctatgacgtcccggactatgcaggatcctatccatatgacgttccagattacgctactagttacccatacgatgttcctgactatgcgggctatccctatgacgtcccggactatgcaggatcctatccatatgacgttccagattacgcttctagatacccatacgatgttcctgactatgcgggctatccctatgacgtcccggactatgcaggatcctatccatatgacgttccagattacgctactagacaggcctcgtaccagatcctctagctag

SEQ ID NO: 450 - DNA, 1361 bp, Artificial Sequence
  Artificial sequence
  P26267
atgagttacccatacgatgttcctgactatgcgggctatccctatgacgtcccggactatgcaggatcctatccatatgacgttccagattacgcttctagatacccatacgatgttcctgactatgcgggctatccctatgacgtcccggactatgcaggatcctatccatatgacgttccagattacgctactagttacccatacgatgttcctgactatgcgggctatccctatgacgtcccggactatgcaggatcctatccatatgacgttccagattacgcttctagatacccatacgatgttcctgactatgcgggctatccctatgacgtcccggactatgcaggatcctatccatatgacgttccagattacgctactagacaggcctcgtaccggatcctctacctagagaattccgccgctgccgctgcggcagcggctgcagcgggtacctcgatgacggcggattctcaatctgattatgcttttcttgagtccatacgacgacacttactaggagaatcggagccgatactcagtgagtcgacagcgagttcggttactcaatcttgtgtaaccggtcagagcattaaaccggtgtacggacgaaaccctagctttagcaaactgtatccttgcttcaccgagagctggggagatttgccgttgaaagaaaacgattctgaggatatgttagtttacggtatcctcaacgacgcctttcacggcggttgggagccgtcttcttcgtcttccgacgaagatcgtagctctttcccgagtgttaagatcgagactccggagagtttcgcggcggtggattctgttccggtcaagaaggagaagacgagtcctgtttcggcggcggtgacggcggcgaagggaaagcattatagaggagtgagacaaaggccgtgggggaaatttgcggcggagattagagatccggcgaagaacggagctagggtttggttaggaacgtttgagacggcggaggacgcggcgttggcttacgacagagctgctttcaggatgcgtggttcccgcgctttgttgaattttccgttgagagttaattcaggagaacccgacccggttcgaatcaagtccaagagatcttctttttcttcttctaacgagaacggagctccgaagaagaggagaacggtggccgccggtggtggaatggataagggattgacggtgaagtgcgaggttgttgaagtggcacgtggcgatcgtttattggttttataattttgatttttctttgttggatgattatatgattcttcaaaaaagaagaacgttaataaaaaaattcgtttattattaaaaaaaaaaaaaaaagg

SEQ ID NO: 451 - DNA, 2030 bp, Artificial Sequence
  Artificial sequence
  P21169
aagctgatgtgtcatagactcattcactcatatgcttcccctctttcaaatgtataccatttttttttgttaaactcaataaattattaagagaaactcaaactattaagtatgtaaactaatgtcttatatattctaattttttaacgtatctttgttttaacgtatcttttaaactacagattcggatgattacgaaaattaataattatgaatattcaaataaaatggacagtaattcttatataaaaaatccttttgtcaataatctaaccaatgattcactccaaactcatctgacatctctataggcccttattatgattggtatgtccattttggaagtcgtcatgacttatgagcataaaatgaatacatgaatacatgttttgcagtttttttttgcttcttaaacagttgatgtctttaatttgtttcttgtaagtttaagatgttatctatttatataccttgtttcgaaatttgattgtcccattatgtttctgacgtggaattaaaacccaatgagaatggggtcctcctgttagattttccaacaacgataagaatatagaggttgatgtgatttaaaaccaatagaggcagcgcaattgagtaatcatcatcttaccatccttcctcgaagtagtcttcattgcaagttggcaaaagcgagagacccacccattcactttttaacttttagtttagctcgacatgagagaaattatattatgaacaactatctttagtttagctcacatgacggggttttttttttgagaaaagaaaattttgaatttttggtttatcatacaggaactatctttctccggcgggaatttggaagtcattatgcccattaaggagtcataatatatatttgtagttattattgtatctggtgtcaaacaaaaattaatgttagttgtacattgtgagatctaaaacctcgagagatgaagtcttagtaatgtttgaacaaacaataatcacgttttccatcaaattcgagcatttaaagtttatattactacatgccccaagatgataccgtccatctcatccgaaaatatttctgaaattgcgctaagacaacaatgtttgctcaaattcgatcatttaaagtttacaaatctctcatcactcttacaaacttctcacactaaacagaggtacatattttcttataaagacaaaaggttcgaacagctggcttctcaactcgagttgtttgtcagggcctctcttcactaactacaagttggtacttcaaatattggtggctagcttcacgtgatattgtctacaaattaaacccatgaaaaagctgcattaattgttccaagtgaaccctgaggagtgtcaatagtctttgctttagtgtgatcattaaaccaaatctctaaattcctaatttgtactaacatttggaacgtatttcctactcttctccctgctccaactcccaaaaataagattagttagatttctataactaatatacatgtatactcccaaaaacagtaaaaccatattaataaagctaattttgcatagatttatttcggtaaaccggcggttcaagttggggaaaaaaaagacaaacggtctaaagtcatccaaagacaaaaaaccaaagacaagttgagagagacgagaccaatcacaacattgcttcgtagattgcgtgacatcatccttgacggctactttcatttgtgtcttatttggataaaacgcacgtgtttaattcacgaaccttcatagcaataagaaatttccattactttcatattttcaactttttttattacccattacatgcttaaaatattaattcacaagtctttgtcaaaattcaatattttccaggttcatgaaccctttttatctcaatctactctataatatctccctataaattacaacaaaacctctttatttttcattcacaccggacattttgaaatctcaacaagaaccaaaccaaacaacaaaaaaacattcttaataattatctttctgtt

SEQ ID NO: 452 - DNA, 2030 bp, Artificial Sequence; identical to SEQ ID NO: 451
  Artificial sequence
  P25712

SEQ ID NO: 453 - DNA, 2030 bp, Artificial Sequence; identical to SEQ ID NO: 451
  Artificial sequence
  P25650

SEQ ID NO: 454 - DNA, 814 bp, Artificial Sequence; identical to SEQ ID NO: 444
  Artificial sequence
  P23544

SEQ ID NO: 455 - DNA, 1302 bp, Artificial Sequence
  Artificial sequence
  P25086
atggatcaaggaggtcgtagcagtggtagtggaggaggaggagccgagcaagggaagtaccgtggagtaaggagacgaccttggggtaaatacgccgcggaaataagagattcgaggaagcacggagagcgtgtgtggctagggacattcgacactgcggaagacgcggctcgagcctatgaccgagccgcctattcaatgagaggcaaagctgccattctcaacttccctcacgagtataacatgggaaccggatcctcatccactgcggctaattcttcttcctcgtcgcagcaagtttttgagtttgagtacttggacgatagcgttttggatgaacttcttgaatatggagagaactataacaagactcataatatcaacatgggcaagaggcaagcggccgctgaagctcgaaaaacaaagaaaaaaatcaaagggattcagcaagccactgcaggagtctcacaagacacttcggaaaatcctaacaaaacaatagttcctgcagcattaccacagctcacccctaccttggtgtcactgctggaggtgattgaacccgaggtgttgtatgcaggatatgatagctctgttccagattcagcatggagaattatgaccacactcaacatgttaggtgggcgtcaagtgattgcagcagtgaaatgggcaaaggcgataccaggcttcagaaacttacacctggatgaccaaatgaccctgctacagtactcatggatgtttctcatggcatttgccctgggttggagatcatacagacaatcaagtggaaacctgctctgctttgctcctgatctgattattaatgagcagagaatgtctctaccctgcatgtatgaccaatgtaaacacatgctgtttgtctcctctgaattacaaagattgcaggtatcctatgaagagtatctctgtatgaaaaccttactgcttctctcctcagttcctaaggaaggtctgaagagccaagagttatttgatgagattcgaatgacttatatcaaagagctaggaaaagccatcgtcaaaagggaagggaactccagtcagaactggcaacggttttaccaactgacaaagcttctggactccatgcatgaggtggttgagaatctccttacctactgcttccagacatttttggataagaccatgagtattgaattcccagagatgttagctgaaatcatcactaatcagataccaaaatattcaaatggaaatatcaaaaagcttctgtttcatcaaaaatctagacaggcctcgtaccggatcctctag

SEQ ID NO: 456 - DNA, 1287 bp, Artificial Sequence
  Artificial sequence
  P25097
atgaaccttgaagctcgaaaaacaaagaaaaaaatcaaagggattcagcaagccactgcaggagtctcacaagacacttcggaaaatcctaacaaaacaatagttcctgcagcattaccacagctcacccctaccttggtgtcactgctggaggtgattgaacccgaggtgttgtatgcaggatatgatagctctgttccagattcagcatggagaattatgaccacactcaacatgttaggtgggcgtcaagtgattgcagcagtgaaatgggcaaaggcgataccaggcttcagaaacttacacctggatgaccaaatgaccctgctacagtactcatggatgtttctcatggcatttgccctgggttggagatcatacagacaatcaagtggaaacctgctctgctttgctcctgatctgattattaatgagcagagaatgtctctaccctgcatgtatgaccaatgtaaacacatgctgtttgtctcctctgaattacaaagattgcaggtatcctatgaagagtatctctgtatgaaaaccttactgcttctctcctcagttcctaaggaaggtctgaagagccaagagttatttgatgagattcgaatgacttatatcaaagagctaggaaaagccatcgtcaaaagggaagggaactccagtcagaactggcaacggttttaccaactgacaaagcttctggactccatgcatgaggtggttgagaatctccttacctactgcttccagacatttttggataagaccatgagtattgaattcccagagatgttagctgaaatcatcactaatcagataccaaaatattcaaatggaaatatcaaaaagcttctgtttcatcaaaaaggtaccgtcgacatggatcaaggaggtcgtagcagtggtagtggaggaggaggagccgagcaagggaagtaccgtggagtaaggagacgaccttggggtaaatacgccgcggaaataagagattcgaggaagcacggagagcgtgtgtggctagggacattcgacactgcggaagacgcggctcgagcctatgaccgagccgcctattcaatgagaggcaaagctgccattctcaacttccctcacgagtataacatgggaaccggatcctcatccactgcggctaattcttcttcctcgtcgcagcaagtttttgagtttgagtacttggacgatagcgttttggatgaacttcttgaatatggagagaactataacaagactcataatatcaacatgggcaagaggcaataa

SEQ ID NO: 457 - DNA, 535 bp, Artificial Sequence
  Artificial sequence
  P893
ctcttctgacgcacaacagtatatacacatacacagatatatggatcaaggaggtcgtagcagtggtagtggaggaggaggagccgagcaagggaagtaccgtggagtaaggagacgaccttggggtaaatacgccgcggaaataagagattcgaggaagcacggagagcgtgtgtggctagggacattcgacactgcggaagacgcggctcgagcctatgaccgagccgcctattcaatgagaggcaaagctgccattctcaacttccctcacgagtataacatgggaaccggatcctcatccactgcggctaattcttcttcctcgtcgcagcaagtttttgagtttgagtacttggacgatagcgttttggatgaacttcttgaatatggagagaactataacaagactcataatatcaacatgggcaagaggcaataaagggaatacaatcggtattaactgaaagttatgtgaaagaccattttcagttataacaaataaaataaaatcccaagcgtacaaagctgtttc

SEQ ID NO: 458 - DNA, 535 bp, Artificial Sequence; identical to SEQ ID NO: 457
  Artificial sequence
  P3852

SEQ ID NO: 459 - DNA, 2956 bp, Artificial Sequence
  Artificial sequence
  P25123
acgaagacataaaaagactttagttctagctatatgttgtccccaacctcgagagcccttacttacactagtcgtaatggcgacaacaatatagattctgattctatatcaatcgaaaccacacaatcttctttttcccagagattattaatttacaatagaatagacgttaattccaatcttcttaaatttaattctttttattgttgaataaacgtagattcatctctcctttcaattcaagaaagacgtcggaaatgtatattgaagataagaaaaaaaatgaacaattgaataataataattattttcaatcaggctctattttaaatttctttttcaaatataaaagaatccttagatttgttttttgttttttggaacaaggaagttttgaagtacagtaggttttcgatgatatttgttaccgtctaccgagaattttcaacaaaatcagttttcagttgttgtttttttgtcgcccagttttcggttgttttggtttgtttgttcatagactcggtttatccaaaataaaacattaatgcgacagtattttattttttggtcgcatttatgcgacagtttaagcatttttaaaaaaaatatacaggcactacaacaattgtcataacttaccaaaaaaatatttgtcgtggaccgattcaaagtcaaaggcaagtcagatttaaacgacataataaaatcgtaatcattattttaatgtgattgaaagggaaaggaactcagatatgatagaagaacaaagaaggaaagggaactccaaaactttgttttctagtctaaaaaaaaagacttcgaatatgtacggacacctataagatcgaatccaatattaggagcagccaaaaagggccaattagtgtattttaaaatatatatttttaaaaaggtaacaaaaagaaaacttgaagaagtaggtacattgtgaccatgatgatgaatttatgatcaactaggtacattggacatgtcgttatccttatttcaactgacttaacgttaatgacttattagaaaagcccacgtgacgattaggctaataggtttataaaagtcaatttcgacagagtatagtgtcagtaaaatatctgagatttacgggtgaaagatactatttatggaatgttcacttatacgaagtccttccgtataagtttcttattgactgtgacatctattgttatatttatggaactttagcgattaattttgtggacctagctaactaaagaaagttatatttgttggctcaacgaagtcgtatatttaagttaaaagattcagattctagagtatgtaaggtattataggctgttgattcttgtttttcagttaacaactatatactgtagtgtgtataaggcaattacaaattacttgattctaagctgactactttttttggttttgtatattttagaggactaaatggtgtgattatatttaatgaaaatatgatatcttattaatgcttttaaatacaaacaaaaatgtagattatcgtacatgggaagcgtgatttccaaagcataaaatcaaattgcgaataccttttgtatttgcgttcacaacttacaaacatttcttactaatataaaaacttttatttgttcaatgcatatacaaagttacaaacgcaaccaacatttgattcgatcaaatttctagagatttcaggtaccgtacgttggcaaagatggagaaagtagttcaaatgtcataaaaaattttagcgattaatatttagctcaattttttatacgacattttgaaaaacaaaatcttatattttcttttaaggtagaataagtaatgaatttccagctttatgtagaatatatgcataatttgaaaacaattcaaggccgattcaatgtacttagtaaacgtttttgttcttcttcgttagtggtatgttcgtaaacttgatgttaagaaaagttaattgatctaatctactgcaaattattcaataaaaattaattgatgtgaaaatatatctagaaggaaaaaattctccaaaatgtaaagtcatgtcaagaacttagacccccacacgtagattctgtattaaacaaaaaatttattatggtccaacgaaagcttctgagtcggttttgagagtcaacccacgtgggcactaacgaagtcccaagtcaaacatattcctatgggtcctccaatcaactcttttattcagtacacatcatatttttggtaacataaaattccattgctgttgccaaaaaataccatacaaatatagttttctataataattagttcaagagactgtctaattttatcataaatttcctactttttgcaaaagttcaacttgagttaaaccttataagctctatttagatataaatatttaataatttagatataatgtaaaatataaacgcaaaatataataatttcaaggatataacaaaaaattgttttatatttttgttgcacatgattcttaccatattattaatgttgtacatttccgaaaccccatacatgtatattattatagccataaaaaattgtacatatatgtaaaatacaaaattctcaaaataaaatctattataaaaaaatgaaaaaagaaaaagaaaaagaaaatttattttatgagaaacatctatgttgaaggagaaaaaaggtctaaagaacatctacataattttcataagtggagtttttcgaacttcgaatattaggttgatggacccacttgtttccttgcctataaattccacaaatcaaatctcatttaatccatgcaaaattaaaacacacacaaagacaaaaaaaaaaaaacagacgctacatcttgtgtccgtttccaactcttagaacatccaattcttcttattattctttgtcacttggtctctcttctgacgcacaacagtatatacacatacacagatat

SEQ ID NO: 460 - DNA, 1372 bp, Artificial Sequence
  Artificial sequence
  P25185
cttcttcttcacatcgatcatcatacaacaacaaaaaatggattacagagaatccaccggtgaaagtcagtcaaagtacaaaggaatccgtcgtcggaaatggggcaaatgggtatcagagattagagttccgggaactcgtgaccgtctctggttaggttcattctcaacagcagaaggtgccgccgtagcacacgacgttgctttcttctgtttacaccaacctgattctttagaatctctcaatttccctcatttgcttaatccttcactcgtttccagaacttctccgagatctatccagcaagctgcttctaacgccggcatggccattgacgccggaatcgtccacagtaccagcgtgaactctggatgcggagatacgacgacgtattacgagaatggagctgatcaagtggagccgttgaatatttcagtgtatgattatctgggcggccacgatcacgttgcggccgctgaagctcgaaaaacaaagaaaaaaatcaaagggattcagcaagccactgcaggagtctcacaagacacttcggaaaatcctaacaaaacaatagttcctgcagcattaccacagctcacccctaccttggtgtcactgctggaggtgattgaacccgaggtgttgtatgcaggatatgatagctctgttccagattcagcatggagaattatgaccacactcaacatgttaggtgggcgtcaagtgattgcagcagtgaaatgggcaaaggcgataccaggcttcagaaacttacacctggatgaccaaatgaccctgctacagtactcatggatgtttctcatggcatttgccctgggttggagatcatacagacaatcaagtggaaacctgctctgctttgctcctgatctgattattaatgagcagagaatgtctctaccctgcatgtatgaccaatgtaaacacatgctgtttgtctcctctgaattacaaagattgcaggtatcctatgaagagtatctctgtatgaaaaccttactgcttctctcctcagttcctaaggaaggtctgaagagccaagagttatttgatgagattcgaatgacttatatcaaagagctaggaaaagccatcgtcaaaagggaagggaactccagtcagaactggcaacggttttaccaactgacaaagcttctggactccatgcatgaggtggttgagaatctccttacctactgcttccagacatttttggataagaccatgagtattgaattcccagagatgttagctgaaatcatcactaatcagataccaaaatattcaaatggaaatatcaaaaagcttctgtttcatcaaaaatctagacaggcctcgtaccggatcctctag

SEQ ID NO: 461 - DNA, 1353 bp, Artificial Sequence
  Artificial sequence
  P25187
atgaaccttgaagctcgaaaaacaaagaaaaaaatcaaagggattcagcaagccactgcaggagtctcacaagacacttcggaaaatcctaacaaaacaatagttcctgcagcattaccacagctcacccctaccttggtgtcactgctggaggtgattgaacccgaggtgttgtatgcaggatatgatagctctgttccagattcagcatggagaattatgaccacactcaacatgttaggtgggcgtcaagtgattgcagcagtgaaatgggcaaaggcgataccaggcttcagaaacttacacctggatgaccaaatgaccctgctacagtactcatggatgtttctcatggcatttgccctgggttggagatcatacagacaatcaagtggaaacctgctctgctttgctcctgatctgattattaatgagcagagaatgtctctaccctgcatgtatgaccaatgtaaacacatgctgtttgtctcctctgaattacaaagattgcaggtatcctatgaagagtatctctgtatgaaaaccttactgcttctctcctcagttcctaaggaaggtctgaagagccaagagttatttgatgagattcgaatgacttatatcaaagagctaggaaaagccatcgtcaaaagggaagggaactccagtcagaactggcaacggttttaccaactgacaaagcttctggactccatgcatgaggtggttgagaatctccttacctactgcttccagacatttttggataagaccatgagtattgaattcccagagatgttagctgaaatcatcactaatcagataccaaaatattcaaatggaaatatcaaaaagcttctgtttcatcaaaaaggtaccgtcgacatggattacagagaatccaccggtgaaagtcagtcaaagtacaaaggaatccgtcgtcggaaatggggcaaatgggtatcagagattagagttccgggaactcgtgaccgtctctggttaggttcattctcaacagcagaaggtgccgccgtagcacacgacgttgctttcttctgtttacaccaacctgattctttagaatctctcaatttccctcatttgcttaatccttcactcgtttccagaacttctccgagatctatccagcaagctgcttctaacgccggcatggccattgacgccggaatcgtccacagtaccagcgtgaactctggatgcggagatacgacgacgtattacgagaatggagctgatcaagtggagccgttgaatatttcagtgtatgattatctgggcggccacgatcacgtttgatttatctcgacggtcatgatcacgtttgatctt

SEQ ID NO: 462 - DNA, 825 bp, Artificial Sequence
  Artificial sequence
  P25186
atgcccaattttaatcaaagtgggaatattgctgatagctcattgtccttcactttcactaacagtagcaacggtccgaacctcataacaactcaaacaaattctcaagcgctttcacaaccaattgcctcctctaacgttcatgataacttcatgaataatgaaatcacggctagtaaaattgatgatggtaataattcaaaaccactgtcacctggttggacggaccaaactgcgtataacgcgtttggaatcactacagggatgtttaataccactacaatggatgatgtatataactatctattcgatgatgaagataccccaccaaacccaaaaaaagagggtaccgtcgacatggattacagagaatccaccggtgaaagtcagtcaaagtacaaaggaatccgtcgtcggaaatggggcaaatgggtatcagagattagagttccgggaactcgtgaccgtctctggttaggttcattctcaacagcagaaggtgccgccgtagcacacgacgttgctttcttctgtttacaccaacctgattctttagaatctctcaatttccctcatttgcttaatccttcactcgtttccagaacttctccgagatctatccagcaagctgcttctaacgccggcatggccattgacgccggaatcgtccacagtaccagcgtgaactctggatgcggagatacgacgacgtattacgagaatggagctgatcaagtggagccgttgaatatttcagtgtatgattatctgggcggccacgatcacgtttgatttatctcgacggtcatgatcacgtttgatctt

SEQ ID NO: 463 - DNA, 831 bp, Artificial Sequence
  Artificial sequence
  P25184
cttcttcttcacatcgatcatcatacaacaacaaaaaatggattacagagaatccaccggtgaaagtcagtcaaagtacaaaggaatccgtcgtcggaaatggggcaaatgggtatcagagattagagttccgggaactcgtgaccgtctctggttaggttcattctcaacagcagaaggtgccgccgtagcacacgacgttgctttcttctgtttacaccaacctgattctttagaatctctcaatttccctcatttgcttaatccttcactcgtttccagaacttctccgagatctatccagcaagctgcttctaacgccggcatggccattgacgccggaatcgtccacagtaccagcgtgaactctggatgcggagatacgacgacgtattacgagaatggagctgatcaagtggagccgttgaatatttcagtgtatgattatctgggcggccacgatcacgtttgcggccgccccaattttaatcaaagtgggaatattgctgatagctcattgtccttcactttcactaacagtagcaacggtccgaacctcataacaactcaaacaaattctcaagcgctttcacaaccaattgcctcctctaacgttcatgataacttcatgaataatgaaatcacggctagtaaaattgatgatggtaataattcaaaaccactgtcacctggttggacggaccaaactgcgtataacgcgtttggaatcactacagggatgtttaataccactacaatggatgatgtatataactatctattcgatgatgaagataccccaccaaacccaaaaaaagagtagtaagctag

SEQ ID NO: 464 - DNA, 1176 bp, Artificial Sequence
  Artificial sequence
  P25279
atggattacagagaatccaccggtgaaagtcagtcaaagtacaaaggaatccgtcgtcggaaatggggcaaatgggtatcagagattagagttccgggaactcgtgaccgtctctggttaggttcattctcaacagcagaaggtgccgccgtagcacacgacgttgctttcttctgtttacaccaacctgattctttagaatctctcaatttccctcatttgcttaatccttcactcgtttccagaacttctccgagatctatccagcaagctgcttctaacgccggcatggccattgacgccggaatcgtccacagtaccagcgtgaactctggatgcggagatacgacgacgtattacgagaatggagctgatcaagtggagccgttgaatatttcagtgtatgattatctgggcggccacgatcacgtttgcggccgcatggtgagcaagggcgaggagctgttcaccggggtggtgcccatcctggtcgagctggacggcgacgtaaacggccacaagttcagcgtgtccggcgagggcgagggcgatgccacctacggcaagctgaccctgaagttcatctgcaccaccggcaagctgcccgtgccctggcccaccctcgtgaccaccctgacctacggcgtgcagtgcttcagccgctaccccgaccacatgaagcagcacgacttcttcaagtccgccatgcccgaaggctacgtccaggagcgcaccatcttcttcaaggacgacggcaactacaagacccgcgccgaggtgaagttcgagggcgacaccctggtgaaccgcatcgagctgaagggcatcgacttcaaggaggacggcaacatcctggggcacaagctggagtacaactacaacagccacaacgtctatatcatggccgacaagcagaagaacggcatcaaggtgaacttcaagatccgccacaacatcgaggacggcagcgtgcagctcgccgaccactaccagcagaacacccccatcggcgacggccccgtgctgctgcccgacaaccactacctgagcacccagtccgccctgagcaaagaccccaacgagaagcgcgatcacatggtcctgctggagttcgtgaccgccgccgggatcactctcggcatggacgagctgtacaagtccggagggatcctctag

SEQ ID NO: 465 - DNA, 505 bp, Artificial Sequence
  Artificial sequence
  P894
cttcttcttcacatcgatcatcatacaacaacaaaaaatggattacagagaatccaccggtgaaagtcagtcaaagtacaaaggaatccgtcgtcggaaatggggcaaatgggtatcagagattagagttccgggaactcgtgaccgtctctggttaggttcattctcaacagcagaaggtgccgccgtagcacacgacgttgctttcttctgtttacaccaacctgattctttagaatctctcaatttccctcatttgcttaatccttcactcgtttccagaacttctccgagatctatccagcaagctgcttctaacgccggcatggccattgacgccggaatcgtccacagtaccagcgtgaactctggatgcggagatacgacgacgtattacgagaatggagctgatcaagtggagccgttgaatatttcagtgtatgattatctgggcggccacgatcacgtttgatttatctcgacggtcatgatcacgtttgatctt

SEQ ID NO: 466 - DNA, 505 bp, Artificial Sequence
  Artificial sequence
  P25732
cttcttcttcacatcgatcatcatacaacaacaaaaaatggattacagagaatccaccggtgaaagtcagtcaaagtacaaaggaatccgtcgtcggaaatggggcaaatgggtatcagagattagagagccgggaactcgtgaccgtctctggttaggttcattctcaacagcagaaggtgccgccgtagcacacgacgttgctttcttctgtttacaccaacctgattctttagaatctctcaatttccctcatttgcttaatccttcactcgtttccagaacttctccgagatctatccagcaagctgcttctaacgccggcatggccattgacgccggaatcgtccacagtaccagcgtgaactctggatgcggagatacgacgacgtattacgagaatggagctgatcaagtggagccgttgaatatttcagtgtatgattatctgggcggccacgatcacgtttgatttatctcgacggtcatgatcacgtttgatctt

SEQ ID NO: 467 - DNA, 505 bp, Artificial Sequence
  Artificial sequence
  P25733
cttcttcttcacatcgatcatcatacaacaacaaaaaatggattacagagaatccaccggtgaaagtcagtcaaagtacaaaggaatccgtcgtcggaaatggggcaaatgggtatcagagattagagttccgggaactcgtgaccgtctctggttaggttcattctcaacagcagaaggtgccgccagagcacacgacgttgctttcttctgtttacaccaacctgattctttagaatctctcaatttccctcatttgcttaatccttcactcgtttccagaacttctccgagatctatccagcaagctgcttctaacgccggcatggccattgacgccggaatcgtccacagtaccagcgtgaactctggatgcggagatacgacgacgtattacgagaatggagctgatcaagtggagccgttgaatatttcagtgtatgattatctgggcggccacgatcacgtttgatttatctcgacggtcatgatcacgtttgatctt

SEQ ID NO: 468 - DNA, 505 bp, Artificial Sequence
  Artificial sequence
  P25734
cttcttcttcacatcgatcatcatacaacaacaaaaaatggattacagagaatccaccggtgaaagtcagtcaaagtacaaaggaatccgtcgtcggaaatggggcaaatgggtatcagagattagagttccgggaactcgtgaccgtctctggttaggttcattctcaacagcagaaggtgccgccgtagcatacgacgttgctttcttctgtttacaccaacctgattctttagaatctctcaatttccctcatttgcttaatccttcactcgtttccagaacttctccgagatctatccagcaagctgcttctaacgccggcatggccattgacgccggaatcgtccacagtaccagcgtgaactctggatgcggagatacgacgacgtattacgagaatggagctgatcaagtggagccgttgaatatttcagtgtatgattatctgggcggccacgatcacgtttgatttatctcgacggtcatgatcacgtttgatctt

SEQ ID NO: 469 - DNA, 505 bp, Artificial Sequence
  Artificial sequence
  P25735
cttcttcttcacatcgatcatcatacaacaacaaaaaatggattacagagaatccaccggtgaaagtcagtcaaagtacaaaggaatccgtcgtcggaaatggggcaaatgggtatcagagattagagttccgggaactcgtgaccgtctctggttaggttcattctcaacagcagaaggtgccgccgtagcacacgacacagctttcttctgtttacaccaacctgattctttagaatctctcaatttccctcatttgcttaatccttcactcgtttccagaacttctccgagatctatccagcaagctgcttctaacgccggcatggccattgacgccggaatcgtccacagtaccagcgtgaactctggatgcggagatacgacgacgtattacgagaatggagctgatcaagtggagccgttgaatatttcagtgtatgattatctgggcggccacgatcacgtttgatttatctcgacggtcatgatcacgtttgatctt

SEQ ID NO: 470 - DNA, 435 bp, Artificial Sequence
  Artificial sequence
  P25182
atggattacagagaatccaccggtgaaagtcagtcaaagtacaaaggaatccgtcgtcggaaatggggcaaatgggtatcagagattcgagaacccaacaagcgttcaagactttggctcggctcttactctactcccgaagcggcggcgcgtgcatacgacgttgctttcttctgtttacaccaacctgattctttagaatctctcaatttccctcatttgcttaatccttcactcgtttccagaacttctccgagatctatccagcaagctgcttctaacgccggcatggccattgacgccggaatcgtccacagtaccagcgtgaactctggatgcggagatacgacgacgtattacgagaatggagctgatcaagtggagccgttgaatatttcagtgtatgattatctgggcggccacgatcacgtttga

SEQ ID NO: 471 - DNA, 505 bp, Artificial Sequence; identical to SEQ ID NO: 465
  Artificial sequence
  P3853

SEQ ID NO: 472 - DNA, 1048 bp, Artificial Sequence
  Artificial sequence
  P25195
cttcttcttcacatcgatcatcatacaacaacaaaaaatggattacagagaatccaccggtgaaagtcagtcaaagtacaaaggaatccgtcgtcggaaatggggcaaatgggtatcagagattagagttccgggaactcgtgaccgtctctggttaggttcattctcaacagcagaaggtgccgccgtagcacacgacgttgctttcttctgtttacaccaacctgattctttagaatctctcaatttccctcatttgcttaatccttcactcgtttccagaacttctccgagatctatccagcaagctgcttctaacgccggcatggccattgacgccggaatcgtccacagtaccagcgtgaactctggatgcggagatacgacgacgtattacgagaatggagctgatcaagtggagccgttgaatatttcagtgtatgattatctgggcggccacgatcacgttgcggccgctgccgctgcggcagcggccatggaaaagagaagatggaaaaagaatttcatagccgtctcagcagccaaccgctttaagaaaatctcatcctccggggcacttgattatgatattccaactactgctagcgagaatttgtattttcagggtgagctcaaaaccgcggctcttgcgcaacacgatgaagccgtggacaacaaattcaacaaagaacaacaaaacgcgttctatgagatcttacatttacctaacttaaacgaagaacaacgaaacgccttcatccaaagtttaaaagatgacccaagccaaagcgctaaccttttagcagaagctaaaaagctaaatgatgctcaggcgccgaaagtagacaacaaattcaacaaagaacaacaaaacgcgttctatgagatcttacatttacctaacttaaacgaagaacaacgaaacgccttcatccaaagtttaaaagatgacccaagccaaagcgctaaccttttagcagaagctaaaaagctaaatggtgctcaggcgccgaaagtagacgcgaattccgcggggaagtcaacctga

SEQ ID NO: 473 - DNA, 910 bp, Artificial Sequence
  Artificial sequence
  P25194
cttcttcttcacatcgatcatcatacaacaacaaaaaatggattacagagaatccaccggtgaaagtcagtcaaagtacaaaggaatccgtcgtcggaaatggggcaaatgggtatcagagattagagttccgggaactcgtgaccgtctctggttaggttcattctcaacagcagaaggtgccgccgtagcacacgacgttgctttcttctgtttacaccaacctgattctttagaatctctcaatttccctcatttgcttaatccttcactcgtttccagaacttctccgagatctatccagcaagctgcttctaacgccggcatggccattgacgccggaatcgtccacagtaccagcgtgaactctggatgcggagatacgacgacgtattacgagaatggagctgatcaagtggagccgttgaatatttcagtgtatgattatctgggcggccacgatcacgttgcggccgcggctgccgccgcagccgctgctagttacccatacgatgttcctgactatgcgggctatccctatgacgtcccggactatgcaggatcctatccatatgacgttccggattacgcttctagatacccatacgatgttcctgactatgcgggctatccctatgacgtcccggactatgcaggatcctatccatatgacgttccagattacgctactagttacccatacgatgttcctgactatgcgggctatccctatgacgtcccggactatgcaggatcctatccatatgacgttccagattacgcttctagatacccatacgatgttcctgactatgcgggctatccctatgacgtcccggactatgcaggatcctatccatatgacgttccagattacgctactagacaggcctcgtaccagatcctctag

SEQ ID NO: 474 - DNA, 936 bp, Artificial Sequence
  Artificial sequence
  P26262
atgagttacccatacgatgttcctgactatgcgggctatccctatgacgtcccggactatgcaggatcctatccatatgacgttccagattacgcttctagatacccatacgatgttcctgactatgcgggctatccctatgacgtcccggactatgcaggatcctatccatatgacgttccagattacgctactagttacccatacgatgttcctgactatgcgggctatccctatgacgtcccggactatgcaggatcctatccatatgacgttccagattacgcttctagatacccatacgatgttcctgactatgcgggctatccctatgacgtcccggactatgcaggatcctatccatatgacgttccagattacgctactagacaggcctcgtaccggatcctctacctagagaattccgccgctgccgctgcggcagcggctgcagcgggtaccgtcgacatggattacagagaatccaccggtgaaagtcagtcaaagtacaaaggaatccgtcgtcggaaatggggcaaatgggtatcagagattagagttccgggaactcgtgaccgtctctggttaggttcattctcaacagcagaaggtgccgccgtagcacacgacgttgctttcttctgtttacaccaacctgattctttagaatctctcaatttccctcatttgcttaatccttcactcgtttccagaacttctccgagatctatccagcaagctgcttctaacgccggcatggccattgacgccggaatcgtccacagtaccagcgtgaactctggatgcggagatacgacgacgtattacgagaatggagctgatcaagtggagccgttgaatatttcagtgtatgattatctgggcggccacgatcacgtttgatttatctcgacggtcatgatcacgtttgatctt

SEQ ID NO: 475 - DNA, 1887 bp, Artificial Sequence
  Artificial sequence
  P25134
ccatcaaagcgaaagttcaagcaattttgcttctccgtctgaaagtcaaaggaagaaaggtgagaaagataaaaaaaaagtttcgttgaggaatttcatcgaacatgtggtgagcgaaacataccgtatacagacgaaacatggaagtataagtacatctagagaaacataaaagagataagacagatgtcatgtaggaagaaaaaggaaagaagacagtgattcggagacagtatcgacggaaccggacgaagcgaaagtaggagtagccgcgcgtgaaggttatgtagaaagagactcctttttgacatttattcaatgttctggcatgtgctcagatgatttgggccgcttgtttagatttgtccacttccagacccattgcaattgtaacccattttagcccactaaaatctgactgtaacaactttataaatttatggttttttcaaaatattaccaaggttaaataaatcgtgttagatgaagttggcaccagtttttgatattacaaaatgaggtcactagtattttttttataagaacttataataagtaatttattaattgcattatttcattaatattgattttatatatactgatacactagggtttttataaacatttaaattgtctaaaatcgcatagaccaaccgagtaggtgtgaatatttattgtcagatatcaataatctgctagacgtttctaaaaacatctctaatcgtaacttaccaagttacctttgaggtttcttctaaatgagtcggtgactatgataagacggtgtatcacatcacaatcaactcccaaatgtcagtgtcgagaaaaacctaatcaagtatcaactacaaagaattggttatgcatccgaaggatgaaaacacattaaatacattatgagactgggtttctccgtggatgattcgtgttttggatgtggttgtgtgtgaactaaaatttgacaaccatgtacatgagtcagcagacacagaagaagacaaaaaataactttttccagttagtttgggctgttgtgtctgtgtgttgtccgtggagaatcattaagtcattacagatctttggtcaaatgccaaaaataaaggaccccctttagacggtgctcatgtcacgcatgacgcaatttgtaaccaaaaaaggcaaagaaagtctttctttatcccacgtggtttaaccatcgacgacgacgttttcacattcttcatcggtggagtttgaatcgacttttgtgtttttcactgcttttctctatactattatgtcatcacctattttacagatttttatgaaacgaaatagaggatatatagtagtataaaattctagatttcgacttaagactttttcatataaaaaaaaatgaaaaacctataaattaaggtaacctaactatgatataccaaagcaacaacaacaaaaaataaagattaattttctattttaaaaaaacaaaaaatatcatttattttgaaaccaaacagaacggtatatataccacttgttttatagaaatgactcttactttctaaatacattgaatttactgttagacacagcaaaaaaaaaagttacaacttgaaagaaaaaaaaatcgactagtcaggcacatgtcaaattggtaccactaaaaaaatgggtcatactttgaccagttgattttttcctcgagaattaactagttttataattggtcaacttcattctcattcttgattcatattaaaaaatattatataatattttgactttcactaaacttcaacgtataaatagtctttgtatcttcatattcaaacataaacaacactcaaaagtctcttcttcttcttcttcttcttcacatcgatcatcatacaacaacaaaaa

SEQ ID NO: 476 - DNA, 1887 bp, Artificial Sequence; identical to SEQ ID NO: 475
  Artificial sequence
  P25998

SEQ ID NO: 477 - DNA, 1099 bp, Artificial Sequence
  Artificial sequence
  P197
gccatttgatagattgtttccggtaaagctcagcgagagaagaagaagaacaacaatggagtttacagatttctcaaagacgagtttttactacccgtcgtcacaaagcgtttgggatttcggagatttagcggcggcggagaggcattctttagggttcatggagttattaagttctcagcagcatcaagactttgctactgtttctcctcattccttccttctccaaacgtctcaaccgcaaacgcaaacgcaaccatcggcgaagctgtcttcaagtatcattcaagctccaccgtcagagcaattagtgacgtcaaaggtggagtctttgtgttcggatcatttgttgataaacccaccggcgactcctaactcgtcatcgatttcgtctgcttcaagcgaggctctaaatgaagagaaaccgaaaacagaagacaatgaagaagaaggaggtgaagatcaacaagagaagagtcatactaagaaacagttgaaagcaaagaagaataatcagaagagacagagagaggcaagagtcgcattcatgacaaagagtgaagttgatcatctcgaagatggttatcgctggcgaaaatatggtcaaaaagctgtcaaaaacagtccttttcccaggagttactaccgttgcacaacggcttcatgtaacgtgaagaagagagtggagagatcattcagagatccaagcactgtggttacaacctacgaaggtcaacacactcacattagtccactcacgtctcgtcctatttccactggaggtttcttcggatcgtcaggagctgcttcgagtctcggtaatggttgctttgggtttcctattgatggctccacgttaatctctcctcagttccaacagcttgtccaataccatcaccaacagcagcaacaagaactcatgtcttgttttggaggagtcaacgagtaccttaatagccacgctaatgagtatggtgatgataatcgtgtgaagaagagtcgagttttggttaaagataatggacttctgcaagatgttgttccgtctcatatgttgaaggaagagtagtagtatatatatagtcttatagttttaatc

SEQ ID NO: 478 - DNA, 2012 bp, Artificial Sequence
  Artificial sequence
  P23525
tcgaagttaatatccattgactacacgacacgtgtgataattaccggagaaattaacgtcggggaaactggccgccgcgtggcatacagatgctgacaaattcagacgggaacggtggtagacacgtggcaataaaagacaggaggagcgtggagggtgcttgaccatttatcgccttggaatttgagacttttaaggggcaaaaacggtagctcacaagtcaacacttttgataatctttttgccgtttcgtataattcaattcaaaagttaatgttgataaccacgtaaacacttcttaaaccgaccaaataatataattaaagatttgattgattgataagcttttgtgttttctttttctgttgttgtgcgtgtcaacgtgttgtactctccgtaaacattcatgggccttttcaagtaactgctcaagctggccgatagcaatttaaaataatcaataagcccatattgtttttgaataggcccatggcttattagggcaacatataacgctttaaccacttcgtcatgaaaaaacccatacaacaacatgcagcaactaacattcaacataactgttttcattagcatataatgtacgaaaacatgcaacttatctctataaactgttagatcatgtacttaaaaatgcatagattaaacgttttcaatttatcataacatgtaccacacaaaaaaagtagctagagcagctattcatcttatagaatatatagacgtatctcaccttcgcactgcagatcttatacaaatctttttaagaaaatgaaaaaaggggggctaatctcatatattcttcgaagtctttttgggttattaaatagctttaaccaccacatgtcataaataattgttgttagatacttgtctgattcatgcctttttttttgcgagtcaaagctttgtatacaacaaatgtgcttctttgctctttcgtctcactccatttagtcaaaaattccatttgtgatataaaaatgaatagatgaaaccttgaaatatgtaatgaaaccggtctcgagatgtggttaaagcatatttgtaatcaaaaatatataattaatgaagaaaaacaagtacgttttcggaccacatcggaccagtagaggcacacaaccatacgggtgttgtgcccacttttgacgacattaccatcagaccaaaggaatatatgaaagatacatagagagagatatgttctcgaactaactatttctttttttaccctcttctgattataatattattttcccgttttgctgttctcttctaccaaactttcctcttatatcaaactttcaaatcgaattcctgaactttatatcacagtccttatttgttttctcttgcaacaaatgaatttttttgttattgttgaatagttatatttttaaataagtagctttgacagaatgtatatttaatgtagaatagcaaataaactagaaacaagaacacatataagggacatactggtcatttcgaaagtcaaagccagaggagaagctactatttctccaactgtctgtaaacgaggaatttttacaaccgcaagtcaaaggatttaaaataagtagttatggttgtatctgtcgttcttctttctctatgaactaaaggccgttggaagcaacacacacacacacacagtgaaacactacagtttacagattcgttttctttagctcaatcgaattatattatttcttaatcagtcaatatttaaataatggaggatgatgataagtattaaataaataattattctaggattaatcagacatgcgcagttatataataatcagtttgattttcttttccttttcgagcccctctctctctcactcttttcttttccgagaacccaacaaaaaaaaagctactattaatccttcccctcgtgaggaaatcatttcttcttgtttctcgagatttattctctttctctctctctttctctgtgtgtttcgtgtcttcagattagttcg

SEQ ID NO: 479 - DNA, 2012 bp, Artificial Sequence; identical to SEQ ID NO: 478
  Artificial sequence
  P25137

SEQ ID NO: 480 - DNA, 1051 bp, Artificial Sequence
  Artificial sequence
  P3359
tccagtagttatggataataccaaccgtcttcgtcttcgtcgcggtcccagtcttaggcaaactaagttcactcgatcccgatatgactctgaaggtctctcttcaattcattactctacactcatcctcctaactcgtcagcgttaaattatcttctcatttaatttttgtttggataaaacgaaacaaaaatgcagaagtgagtagcatcgaatgggagtttatcagtatgaccgaacaagaagaagatctcatctctcgaatgtacagacttgtcggtaataggtaacaaattctcttcttctgtcatgtccgattcaacatattttaaaaacaactagtattttataaaattaaaaaaaaaaaaaaaaaaactagtattttataatttaaaaaaaattcacatggcgagagtaacaaatcaaagctgataaagtgttatgttatggtaaacatgattctagagtagtttagactttcgaacgtgtttcgagaaaaatgacatgccaatatttaagcaatgacatgagtattttacttgtataatttcaaaaaaagttttatgttgttgataaactgataaaatgtataattaacagaaactaaaatttcttcttttcttaaagtgtgatgattttaaaaacagtgaaaggattgaataatatattggctcttgaatattattgtctttatatatatacattttaaatttcatttctgcattatatatgttgactcctgaattttgataaatgttttttcagaattttgtgctcgtctataattcaaaaacacattatatgcttgaatattgattgtcaggtgggatttaatagcaggaagagtcgtaggaagaaaggcaaatgagattgagagatactggattatgagaaactctgactatttttctcacaaacgacgacgtcttaataattctccctttttttctacttctcctcttaatctccaagaaaatctaaaattgtaaagaaatcaaaataaaagctttcaatcataaaagtagaacaaatcttgaatgtcttctcatca

SEQ ID NO: 481 - DNA, 1993 bp, Artificial Sequence
  Artificial sequence
  P23526
aattccacccacatgcagctgaccataattaacaaaccactctcaatcaatactatcaaatcacataatctcatgcttaagagttaagacacctaaatcgttcatacaatcatgctcacattcacatatcatatacattcaatttcatgcacatgttcgtatgcactattgttcgtaaccacttagctatctcaaccatccatcatttcactatcttaaccatcgagccctcagatataatgcttggcatctctccatctcttagtcatcttgaccctcaaacttatctgattctcaagatagtgagagctcaggactcataatataggagttttagattttgctcaccatattgggccattaagccctgtttccttttttagtccaatcagatcctataattccagtgtataccaagcttcctgatctttaaacacttttaggcaaatataatttcttgtcctttcttacttagaaccattcttcacatgagaaccatcatttgtgtatatatattaataactttcaaaaccttaataatgatcacgacataaaatctttataatgagagcgggtcattacaggtgaactcctttgtccgtcatatcagccgtcttagaagctcgtatgtgcccaatactctcaggaccagccctgagctcgtatgcattaattactgatctggttttaaaatttgtatatatacgtacatagccatatgggatacttcaaatgtatgattttgtctcgacagcttttacaagtttagtcgaagtgaccagacaacagctgcaatccgaaagcatgtttcaatgaagtcgttctagtccatgactgaaaatttgttatactgaatgttgtcgataactttccttttgttaacgaatgcttgtcgataaatttatatatatccagtattatgatcacataatgataaattagaggaatttcatatttttgaattggtcttagctaatacgtaccacgtaggatcaattttctcctaacctacttctttaatatatagtgggtaaaatcataaatggttcattctgatttcacgctgagaaaatgatatgctcattatataagtaccgatttctctaagacaactttcaatctgtcaggaaaagaaattgatacgtccgtttcttacagttactgcatttattatcactgagacgataattgagttctgtagatgcataaataggaattatctgtagggcatgcatatgtaaaattagacacacacaaaaaaatctaaagagaaaaaagcacaagaaaacaaaagttttgttggattttgctagtattatttacgacccacaaatctatatcacaacacgaaattaacggtttatggactttttttgtccaattttcacgaagtcgaaaatttcggggaaaaaatttcacctaatgttattggagaactgtaaaataaaattatagattatgtacatccacattccacagccatctccgtccgtaaaaatttctaaaatataaaaagaaaaactgtgattttaaattagaacttgtaggattacgtgttcataatatttattgagaagtgtatttgcatgtgatgtttttcactcgattttaatacgttactaggcaaaaaaataaaactagcacgccattttagtgactgttaaaatgttctgttataggtcagaaacaaaatctgatcaaaatttattgtgagcattatgaactttttggaatagtaaaaaacaaatcgaacgtatcacgaaattatgttttgacgtattcgatcgggatatataaaaacaaaaatgtgaattataaatttaggaatatatacgtagaaattccaataaaaaataaatcacctatctctctctctctctttttatataactatttttttccctcacatcttttctatatcttgcattctccaaactctacattttcagtttctctgtaaatttatctaatattcttctattttccagtagtt

SEQ ID NO: 482 - DNA, 1993 bp, Artificial Sequence; identical to SEQ ID NO: 481
  Artificial sequence
  P25138

SEQ ID NO: 483 - DNA, 1651 bp, Artificial Sequence
  Artificial sequence
  P21294
tcgacggatttgaggattacctggaacctctaaagatatacctagcgaggtacagggagttggagggtgataataagggatcaggaaagagtggagatggatcaaatagagatgctggtggcggtgtttctggtgaagaaatgccgagctggtaaaagaagttgcaagtagtgattaagaacaatcgccaaatgatcaagggaaattagagatcagtgagttgtttatagttgagctgatcgacaactatttcgggtttactctcaatttcggttatgttagtttgaacgtttggtttattgtttccggtttagttggttgtatttaaagatttctctgttagatgttgagaacacttgaatgaaggaaaaatttgtccacatcctgttgttattcgattcactcgaattcggtagcccaattggtaaggaaataattattttcttttttccttttagtataaaatagttaagtgatgttaattagtatgattataataatatagttgttataattgtgaaaaaataatttataaatatattgtttacataaacaacatagtaatgtaaaaaaatatgacaagtgatgtgtaagacgaagaagataaaagttgagagtaagtatattatttttaatgaatttgatcgaacatgtaagatgatatactagcattaatatttgttttaatcataatagtaattctagctggtttgatgaattaaatatcaatgataaaatactatagtaaaaataagaataaataaattaaaataatatttttttatgattaatagtttattatataattaaatatctataccattactaaatattttagtttaaaagttaataaatattttgttagaaattccaatctgcttgtaatttatcaataaacaaaatattaaataacaagctaaagtaacaaataatatcaaactaatagaaacagtaatctaatgtaacaaaacataatctaatgctaatataacaaagcgcaagatctatcaattttatatagtattatttttcaatcaacattcttattaatttctaaataatacttgtagttttattaacttctaaatggattgactattaattaaatgaattagtcgaacatgaataaacaaggtaacatgatagatcatgtcattgtgttatcattgatcttacatttggattgattacagttgggaaattgggttcgaaatcgataatcttgcggccgctctagagaattcgagtgaatcgaataacaacaggatgtggacaaatttttccttcattcaagtgttctcaacatctaacagagaaatctttaaatacaaccaactaaaccggaaacaataaaccaaacgttcaaactaacataaccgaaattgagagtaaacccgaaatagttgtcgatcagctcaactataaacaactcactgatctctaatttcccttgatcatttggcgattgttcttaatcactacttgcaacttcttttaccagctcggcatttcttcaccagaaacaccgccaccagcatctctatttgatccatctccactctttcctgatcccttattatcaccctccaactccctgtacctcgctaggtatatctttagaggttccaggtaatcctcaaatccgtcgacg

SEQ ID NO: 484 - DNA, 1351 bp, Artificial Sequence
  Artificial sequence
  P21300
tcgacaggaatgcgtctctgagttcatcagcttcgtcaccagcgaggctagtgataagtgccaaagagagaagaggaagaccatcaatggagatgatttgctttgggctatggccactttaggatttgaggattacgcggccgcggagcaagacaggttcttaccgatcgctaacgtcagccggatcatgaagaaggccttgcccgccaacgccaagatctctaaggatgctaaagaaacgatgcaggagtgtgtgaattcggtagcccaattggtaaggaaataattattttcttttttccttttagtataaaatagttaagtgatgttaattagtatgattataataatatagttgttataattgtgaaaaaataatttataaatatattgtttacataaacaacatagtaatgtaaaaaaatatgacaagtgatgtgtaagacgaagaagataaaagttgagagtaagtatattatttttaatgaatttgatcgaacatgtaagatgatatactagcattaatatttgttttaatcataatagtaattctagctggtttgatgaattaaatatcaatgataaaatactatagtaaaaataagaataaataaattaaaataatatttttttatgattaatagtttattatataattaaatatctataccattactaaatattttagtttaaaagttaataaatattttgttagaaattccaatctgcttgtaatttatcaataaacaaaatattaaataacaagctaaagtaacaaataatatcaaactaatagaaacagtaatctaatgtaacaaaacataatctaatgctaatataacaaagcgcaagatctatcaattttatatagtattatttttcaatcaacattcttattaatttctaaataatacttgtagttttattaacttctaaatggattgactattaattaaatgaattagtcgaacatgaataaacaaggtaacatgatagatcatgtcattgtgttatcattgatcttacatttggattgattacagttgggaaattgggttcgaaatcgataatcttgcggccgctctagagaattcacacactcctgcatcgtttctttagcatccttagagatcttggcgttggcgggcaaggccttcttcatgatccggctgacgttagcgatcggtaagaacctgtcttgctccgcggccgcgtaatcctcaaatcctaaagtggccatagcccaaagcaaatcatctccattgatggtcttcctcttctctctttggcacttatcactagcctcgctggtgacgaagctgatgaactcagagacgcattcctgtcgacg

SEQ ID NO: 485 - DNA, 1341 bp, Artificial Sequence
  Artificial sequence
  P21206
cccaatctagtataaatggcggatacgccttcgagcccagctggagatggcggagaaagcggcggttccgttagggagcaggatcgataccttcctatagctaatatcagcaggatcatgaagaaagcgttgcctcctaatggtaagattggaaaagatgctaaggatacagttcaggaatgcgtctctgagttcatcagcttcatcactagcgaggccagtgataagtgtcaaaaagagaaaaggaaaactgtgaatggtgatgatttgttgtgggcaatggcaacattaggatttgaggattacctggaacctctaaagatatacctagcgaggtacagggagttggagggtgataataagggatcaggaaagagtggagatggatcaaatagagatgctggtggcggtgtttctggtgaagaaatgccgagctgggcggccgctgaagctcgaaaaacaaagaaaaaaatcaaagggattcagcaagccactgcaggagtctcacaagacacttcggaaaatcctaacaaaacaatagttcctgcagcattaccacagctcacccctaccttggtgtcactgctggaggtgattgaacccgaggtgttgtatgcaggatatgatagctctgttccagattcagcatggagaattatgaccacactcaacatgttaggtgggcgtcaagtgattgcagcagtgaaatgggcaaaggcgataccaggcttcagaaacttacacctggatgaccaaatgaccctgctacagtactcatggatgtttctcatggcatttgccctgggttggagatcatacagacaatcaagtggaaacctgctctgctttgctcctgatctgattattaatgagcagagaatgtctctaccctgcatgtatgaccaatgtaaacacatgctgtttgtctcctctgaattacaaagattgcaggtatcctatgaagagtatctctgtatgaaaaccttactgcttctctcctcagttcctaaggaaggtctgaagagccaagagttatttgatgagattcgaatgacttatatcaaagagctaggaaaagccatcgtcaaaagggaagggaactccagtcagaactggcaacggttttaccaactgacaaagcttctggactccatgcatgaggtggttgagaatctccttacctactgcttccagacatttttggataagaccatgagtattgaattcccagagatgttagctgaaatcatcactaatcagataccaaaatattcaaatggaaatatcaaaaagcttctgtttcatcaaaaatctagacaggcctcgtaccggatcctctag

SEQ ID NO: 486 - DNA, 1502 bp, Artificial Sequence
  Artificial sequence
  P21281
cccaatctagtataaatggcggatacgccttcgagcccagctggagatggcggagaaagcggcggttccgttagggagcaggatcgataccttcctatagctaatatcagcaggatcatgaagaaagcgttgcctcctaatggtaagattggaaaagatgctaaggatacagttcaggaatgcgtctctgagttcatcagcttcatcactagcgaggccagtgataagtgtcaaaaagagaaaaggaaaactgtgaatggtgatgatttgttgtgggcaatggcaacattaggatttgaggattacctggaacctctaaagatatacctagcgaggtacagggagttggagggtgataataagggatcaggaaagagtggagatggatcaaatagagatgctggtggcggtgtttctggtgaagaaatgccgagctgggcggccgctgaagctcgaaaaacaaagaaaaaaatcaaagggattcagcaagccactgcaggagtctcacaagacacttcggaaaatcctaacaaaacaatagttcctgcagcattaccacagctcacccctaccttggtgtcactgctggaggtgattgaacccgaggtgttgtatgcaggatatgatagctctgttccagattcagcatggagaattatgaccacactcaacatgttaggtgggcgtcaagtgattgcagcagtgaaatgggcaaaggcgataccaggcttcagaaacttacacctggatgaccaaatgaccctgctacagtactcatggatgtttctcatggcatttgccctgggttggagatcatacagacaatcaagtggaaacctgctctgctttgctcctgatctgattattaatgagcagagaatgtctctaccctgcatgtatgaccaatgtaaacacatgctgtttgtctcctctgaattacaaagattgcaggtatcctatgaagagtatctctgtatgaaaaccttactgcttctctcctcagttcctaaggaaggtctgaagagccaagagttatttgatgagattcgaatgacttatatcaaagagctaggaaaagccatcgtcaaaagggaagggaactccagtcagaactggcaacggttttaccaactgacaaagcttctggactccatgcatgaggtggttgagaatctccttacctactgcttccagacatttttggataagaccatgagtattgaattcccagagatgttagctgaaatcatcactaatcagataccaaaatattcaaatggaaatatcaaaaagcttctgtttcatcaaaaatctagttacccatacgatgttcctgactatgcgggctatccctatgacgtcccggactatgcaggatcctatccatatgacgttccagattacgcttctagatacccatacgatgttcctgactatgcgggctatccctatgacgtcccggactatgcaggatcctatccatatgacgttccagattacgc

SEQ ID NO: 487 - DNA, 1638 bp, Artificial Sequence
  Artificial sequence
  P21212
aaatgaaccttgaagctcgaaaaacaaagaaaaaaatcaaagggattcagcaagccactgcaggagtctcacaagacacttcggaaaatcctaacaaaacaatagttcctgcagcattaccacagctcacccctaccttggtgtcactgctggaggtgattgaacccgaggtgttgtatgcaggatatgatagctctgttccagattcagcatggagaattatgaccacactcaacatgttaggtgggcgtcaagtgattgcagcagtgaaatgggcaaaggcgataccaggcttcagaaacttacacctggatgaccaaatgaccctgctacagtactcatggatgtttctcatggcatttgccctgggttggagatcatacagacaatcaagtggaaacctgctctgctttgctcctgatctgattattaatgagcagagaatgtctctaccctgcatgtatgaccaatgtaaacacatgctgtttgtctcctctgaattacaaagattgcaggtatcctatgaagagtatctctgtatgaaaaccttactgcttctctcctcagttcctaaggaaggtctgaagagccaagagttatttgatgagattcgaatgacttatatcaaagagctaggaaaagccatcgtcaaaagggaagggaactccagtcagaactggcaacggttttaccaactgacaaagcttctggactccatgcatgaggtggttgagaatctccttacctactgcttccagacatttttggataagaccatgagtattgaattcccagagatgttagctgaaatcatcactaatcagataccaaaatattcaaatggaaatatcaaaaagcttctgtttcatcaaaaaggtaccgtcgacgcggatacgccttcgagcccagctggagatggcggagaaagcggcggttccgttagggagcaggatcgataccttcctatagctaatatcagcaggatcatgaagaaagcgttgcctcctaatggtaagattggaaaagatgctaaggatacagttcaggaatgcgtctctgagttcatcagcttcatcactagcgaggccagtgataagtgtcaaaaagagaaaaggaaaactgtgaatggtgatgatttgttgtgggcaatggcaacattaggatttgaggattacctggaacctctaaagatatacctagcgaggtacagggagttggagggtgataataagggatcaggaaagagtggagatggatcaaatagagatgctggtggcggtgtttctggtgaagaaatgccgagctggtaaaagaagttgcaagtagtgattaagaacaatcgccaaatgatcaagggaaattagagatcagtgagttgtttatagttgagctgatcgacaactatttcgggtttactctcaatttcggttatgttagtttgaacgtttggtttattgtttccggtttagttggttgtatttaaagatttctctgttagatgttgagaacacttgaatgaaggaaaaatttgtccacatcctgttgttattttcgattcactttcggaatttcatagctaatttattctcatttaatacaaaatccttaaattaaaaaaaaaaaaaaaaaaaaaaaagg

SEQ ID NO: 488 - DNA, 1728 bp, Artificial Sequence
  Artificial sequence
  P21287
atgaaccttgaagctcgaaaaacaaagaaaaaaatcaaagggattcagcaagccactgcaggagtctcacaagacacttcggaaaatcctaacaaaacaatagttcctgcagcattaccacagctcacccctaccttggtgtcactgctggaggtgattgaacccgaggtgttgtatgcaggatatgatagctctgttccagattcagcatggagaattatgaccacactcaacatgttaggtgggcgtcaagtgattgcagcagtgaaatgggcaaaggcgataccaggcttcagaaacttacacctggatgaccaaatgaccctgctacagtactcatggatgtttctcatggcatttgccctgggttggagatcatacagacaatcaagtggaaacctgctctgctttgctcctgatctgattattaatgagcagagaatgtctctaccctgcatgtatgaccaatgtaaacacatgctgtttgtctcctctgaattacaaagattgcaggtatcctatgaagagtatctctgtatgaaaaccttactgcttctctcctcagttcctaaggaaggtctgaagagccaagagttatttgatgagattcgaatgacttatatcaaagagctaggaaaagccatcgtcaaaagggaagggaactccagtcagaactggcaacggttttaccaactgacaaagcttctggactccatgcatgaggtggttgagaatctccttacctactgcttccagacatttttggataagaccatgagtattgaattcccagagatgttagctgaaatcatcactaatcagataccaaaatattcaaatggaaatatcaaaaagcttctgtttcatcaaaaaggtaccgtcgacgcggatacgccttcgagcccagctggagatggcggagaaagcggcggttccgttagggagcaggatcgataccttcctatagctaatatcagcaggatcatgaagaaagcgttgcctcctaatggtaagattggaaaagatgctaaggatacagttcaggaatgcgtctctgagttcatcagcttcatcactagcgaggccagtgataagtgtcaaaaagagaaaaggaaaactgtgaatggtgatgatttgttgtgggcaatggcaacattaggatttgaggattacctggaacctctaaagatatacctagcgaggtacagggagttggagggtgataataagggatcaggaaagagtggagatggatcaaatagagatgctggtggcggtgtttctggtgaagaaatgccgagctggtgcggccgctctagttacccatacgatgttcctgactatgcgggctatccctatgacgtcccggactatgcaggatcctatccatatgacgttccagattacgcttctagatacccatacgatgttcctgactatgcgggctatccctatgacgtcccggactatgcaggatcctatccatatgacgttccagattacgctactagttacccatacgatgttcctgactatgcgggctatccctatgacgtcccggactatgcaggatcctatccatatgacgttccagattacgcttctagatacccatacgatgttcctgactatgcgggctatccctatgacgtcccggactatgcaggatcctatccatatgacgttccagattacgctactagacaggcctcgtaccggatcctctag

SEQ ID NO: 489 - DNA, 1351 bp, Artificial Sequence; identical to SEQ ID NO: 484
  Artificial sequence
  P21159

SEQ ID NO: 490 - DNA, 1351 bp, Artificial Sequence
  Artificial sequence
  P21305
tcgacaggaatgcgtctctgagttcatcagcttcgtcaccagcgaggctagtgataagtgccaaagagagaaaaggaagaccatcaatggagatgatttgctttgggctatggtcactttaggatttgaggattacgcggccgcggagcaagacaggttcttaccgatcgctaacgttagcaggatcatgaagaaagcacttcctgcgaacgcaaaaatctctaaggatgctaaagaaacgatgcaggagtgtgtgaattcggtagcccaattggtaaggaaataattattttcttttttccttttagtataaaatagttaagtgatgttaattagtatgattataataatatagttgttataattgtgaaaaaataatttataaatatattgtttacataaacaacatagtaatgtaaaaaaatatgacaagtgatgtgtaagacgaagaagataaaagttgagagtaagtatattatttttaatgaatttgatcgaacatgtaagatgatatactagcattaatatttgttttaatcataatagtaattctagctggtttgatgaattaaatatcaatgataaaatactatagtaaaaataagaataaataaattaaaataatatttttttatgattaatagtttattatataattaaatatctataccattactaaatattttagtttaaaagttaataaatattttgttagaaattccaatctgcttgtaatttatcaataaacaaaatattaaataacaagctaaagtaacaaataatatcaaactaatagaaacagtaatctaatgtaacaaaacataatctaatgctaatataacaaagcgcaagatctatcaattttatatagtattatttttcaatcaacattcttattaatttctaaataatacttgtagttttattaacttctaaatggattgactattaattaaatgaattagtcgaacatgaataaacaaggtaacatgatagatcatgtcattgtgttatcattgatattacatttggattgattacagttgggaaattgggttcgaaatcgataagcttgcggccgctctagagaattcacacactcctgcatcgtttctttagcatccttagagatttttgcgttcgcaggaagtgctttcttcatgatcctgctaacgttagcgatcggtaagaacctgtcttgctccgcggccgcgtaatcctcaaatcctaaagtgaccatagcccaaagcaaatcatctccattgatggtcttccttttctctctttggcacttatcactagcctcgctggtgacgaagctgatgaactcagagacgcattcctgtcgacg

SEQ ID NO: 491 - DNA, 1108 bp, Artificial Sequence
  Artificial sequence
  P21200
atgcccaattttaatcaaagtgggaatattgctgatagctcattgtccttcactttcactaacagtagcaacggtccgaacctcataacaactcaaacaaattctcaagcgctttcacaaccaattgcctcctctaacgttcatgataacttcatgaataatgaaatcacggctagtaaaattgatgatggtaataattcaaaaccactgtcacctggttggacggaccaaactgcgtataacgcgtttggaatcactacagggatgtttaataccactacaatggatgatgtatataactatctattcgatgatgaagataccccaccaaacccaaaaaaagagggtaccgtcgacgcggatacgccttcgagcccagctggagatggcggagaaagcggcggttccgttagggagcaggatcgataccttcctatagctaatatcagcaggatcatgaagaaagcgttgcctcctaatggtaagattggaaaagatgctaaggatacagttcaggaatgcgtctctgagttcatcagcttcatcactagcgaggccagtgataagtgtcaaaaagagaaaaggaaaactgtgaatggtgatgatttgttgtgggcaatggcaacattaggatttgaggattacctggaacctctaaagatatacctagcgaggtacagggagttggagggtgataataagggatcaggaaagagtggagatggatcaaatagagatgctggtggcggtgtttctggtgaagaaatgccgagctggtaaaagaagttgcaagtagtgattaagaacaatcgccaaatgatcaagggaaattagagatcagtgagttgtttatagttgagctgatcgacaactatttcgggtttactctcaatttcggttatgttagtttgaacgtttggtttattgtttccggtttagttggttgtatttaaagatttctctgttagatgttgagaacacttgaatgaaggaaaaatttgtccacatcctgttgttattttcgattcactttcggaatttcatagctaatttattctcatttaatacaaaatccttaaattaaaaaaaaaaaaaaaaaaaaaaaagg

SEQ ID NO: 492 - DNA, 1167 bp, Artificial Sequence
  Artificial sequence
  P25281
atggcggatacgccttcgagcccagctggagatggcggagaaagcggcggttccgttagggagcaggatcgataccttcctatagctaatatcagcaggatcatgaagaaagcgttgcctcctaatggtaagattggaaaagatgctaaggatacagttcaggaatgcgtctctgagttcatcagcttcatcactagcgaggccagtgataagtgtcaaaaagagaaaaggaaaactgtgaatggtgatgatttgttgtgggcaatggcaacattaggatttgaggattacctggaacctctaaagatatacctagcgaggtacagggagttggagggtgataataagggatcaggaaagagtggagatggatcaaatagagatgctggtggcggtgtttctggtgaagaaatgccgagctggtgcggccgcatggtgagcaagggcgaggagctgttcaccggggtggtgcccatcctggtcgagctggacggcgacgtaaacggccacaagttcagcgtgtccggcgagggcgagggcgatgccacctacggcaagctgaccctgaagttcatctgcaccaccggcaagctgcccgtgccctggcccaccctcgtgaccaccctgacctacggcgtgcagtgcttcagccgctaccccgaccacatgaagcagcacgacttcttcaagtccgccatgcccgaaggctacgtccaggagcgcaccatcttcttcaaggacgacggcaactacaagacccgcgccgaggtgaagttcgagggcgacaccctggtgaaccgcatcgagctgaagggcatcgacttcaaggaggacggcaacatcctggggcacaagctggagtacaactacaacagccacaacgtctatatcatggccgacaagcagaagaacggcatcaaggtgaacttcaagatccgccacaacatcgaggacggcagcgtgcagctcgccgaccactaccagcagaacacccccatcggcgacggccccgtgctgctgcccgacaaccactacctgagcacccagtccgccctgagcaaagaccccaacgagaagcgcgatcacatggtcctgctggagttcgtgaccgccgccgggatcactctcggcatggacgagctgtacaagtccggagggatcctctag

SEQ ID NO: 493 - DNA, 831 bp, Artificial Sequence
  Artificial sequence
  P46
agcgtttcgtagaaaaattcgatttctctaaagccctaaaactaaaacgactatccccaattccaagttctagggtttccatcttccccaatctagtataaatggcggatacgccttcgagcccagctggagatggcggagaaagcggcggttccgttagggagcaggatcgataccttcctatagctaatatcagcaggatcatgaagaaagcgttgcctcctaatggtaagattggaaaagatgctaaggatacagttcaggaatgcgtctctgagttcatcagcttcatcactagcgaggccagtgataagtgtcaaaaagagaaaaggaaaactgtgaatggtgatgatttgttgtgggcaatggcaacattaggatttgaggattacctggaacctctaaagatatacctagcgaggtacagggagttggagggtgataataagggatcaggaaagagtggagatggatcaaatagagatgctggtggcggtgtttctggtgaagaaatgccgagctggtaaaagaagttgcaagtagtgattaagaacaatcgccaaatgatcaagggaaattagagatcagtgagttgtttatagttgagctgatcgacaactatttcgggtttactctcaatttcggttatgttagtttgaacgtttggtttattgtttccggtttagttggttgtatttaaagatttctctgttagatgttgagaacacttgaatgaaggaaaaatttgtccacatcctgttgttattttcgattcactttcggaatttcatagctaatttattctcatttaataccaaatccttaaattaa

SEQ ID NO: 494 - DNA, 792 bp, Artificial Sequence
  Artificial sequence
  P21146
cccaatctagtataaatggcggatacgccttcgagcccagctggagatggcggagaaagcggcggttccgttagggagcaggatcgataccttcctatagctaatatcagcaggatcatgaagaaagcgttgcctcctaatggtaagattggaaaagatgctaaggatacagttcaggaatgcgtctctgagttcatcagcttcatcactagcgaggccagtgataagtgtcaaaaagagaaaaggaaaactgtgaatggtgatgatttgttgtgggcaatggcaacattaggatttgaggattacctggaacctctaaagatatacctagcgaggtacagggagttggagggtgataataagggatcaggaaagagtggagatggatcaaatagagatgctggtggcggtgtttctggtgaagaaatgccgagctgggaattccccaattttaatcaaagtgggaatattgctgatagctcattgtccttcactttcactaacagtagcaacggtccgaacctcataacaactcaaacaaattctcaagcgctttcacaaccaattgcctcctctaacgttcatgataacttcatgaataatgaaatcacggctagtaaaattgatgatggtaataattcaaaaccactgtcacctggttggacggaccaaactgcgtataacgcgtttggaatcactacagggatgtttaataccactacaatggatgatgtatataactatctattcgatgatgaagataccccaccaaacccaaaaaaagagtagtaa

SEQ ID NO: 495 - DNA, 236 bp, Artificial Sequence
  Artificial sequence
  P21274
tcgacgatgctatggatacagttcaggaatgcgtctctgagttcatcagcttcatcactagcgaggccagtgataagtgtcaaaaagagaaaaggaaaactgtgaatggtgatgatttgttgtgggcaatggcaacattaggatttgaggattacctggaacctctaaagatatacctagcgaggtacagggagttggagggtgataataagggatgaggaaagagtggagatggc

SEQ ID NO: 496 - DNA, 226 bp, Artificial Sequence
  Artificial sequence
  P21273
tcgacgttccgttatggagcaggatcgataccttcctatagctaatatcagcaggatcatgaagaaagcgttgcctcctaatggtaagattggaaaagatgctaaggatacagttcaggaatgcgtctctgagttcatcagcttcatcactagcgaggccagtgataagtgtcaaaaagagaaaaggaaaactgtgaatggtgatgattagttgtgggcaatgggc

SEQ ID NO: 497 - DNA, 862 bp, Artificial Sequence
  Artificial sequence
  P25885
ccacgcgtccgagcgtttcgtagaaaaattcgatttctctaaagccctaaaactaaaacgactatccccaattccaagttctagggtttccatcttccccaatctagtataaatggcggatacgccttcgagcccagctggagatggcggagaaagcggcggttccgttagggagcaggatcgataccttcctatagctaatatcagcaggatcatgaagaaagcgttgcctcctaatggtaagattggaaaagatgctaaggatacagttcaggaatcagtctctgagttcatcagcttcatcactagcgaggccagtgataagtgtcaaaaagagaaaaggaaaactgtgaatggtgatgatttgttgtgggcaatggcaacattaggatttgaggattacctggaacctctaaagatatacctagcgaggtacagggagttggagggtgataataagggatcaggaaagagtggagatggatcaaatagagatgctggtggcggtgtttctggtgaagaaatgccgagctggtaaaagaagttgcaagtagtgattaagaacaatcgccaaatgatcaagggaaattagagatcagtgagttgtttatagttgagctgatcgacaactatttcgggtttactctcaatttcggttatgttagtttgaacgtttggtttattgtttccggtttagttggttgtatttaaagatttctctgttagatgttgagaacacttgaatgaaggaaaaatttgtccacatcctgttgttattttcgattcactttcggaatttcatagctaatttattctcatttaatacaaaatccttaaattaaaaaaaaaaaaaaaaaaaaaa

SEQ ID NO: 498 - DNA, 862 bp, Artificial Sequence
  Artificial sequence
  P25886
ccacgcgtccgagcgtttcgtagaaaaattcgatttctctaaagccctaaaactaaaacgactatccccaattccaagttctagggtttccatcttccccaatctagtataaatggcggatacgccttcgagcccagctggagatggcggagaaagcggcggttccgttagggagcaggatcgataccttcctatagctaatatcagcaggatcatgaagaaagcgttgcctcctaatggtaagattggaaaagatgctaaggatacagttcaggaatgcgtctctgagttcatcagcttcatcactagcgaggccagtgataagtctcaaaaagagaaaaggaaaactgtgaatggtgatgatttgttgtgggcaatggcaacattaggatttgaggattacctggaacctctaaagatatacctagcgaggtacagggagttggagggtgataataagggatcaggaaagagtggagatggatcaaatagagatgctggtggcggtgtttctggtgaagaaatgccgagctggtaaaagaagttgcaagtagtgattaagaacaatcgccaaatgatcaagggaaattagagatcagtgagttgtttatagttgagctgatcgacaactatttcgggtttactctcaatttcggttatgttagtttgaacgtttggtttattgtttccggtttagttggttgtatttaaagatttctctgttagatgttgagaacacttgaatgaaggaaaaatttgtccacatcctgttgttattttcgattcactttcggaatttcatagctaatttattctcatttaatacaaaatccttaaattaaaaaaaaaaaaaaaaaaaaaa

SEQ ID NO: 499 - DNA, 862 bp, Artificial Sequence
  Artificial sequence
  P25888
ccacgcgtccgagcgtttcgtagaaaaattcgatttctctaaagccctaaaactaaaacgactatccccaattccaagttctagggtttccatcttccccaatctagtataaatggcggatacgccttcgagcccagctggagatggcggagaaagcggcggttccgttagggagcaggatcgataccttcctatagctaatatcagcaggatcatgaagaaagcgttgcctcctaatggtaagattagcaaagatgctaaggatacagttcaggaatgcgtctctgagttcatcagcttcatcactagcgaggccagtgataagtgtcaaaaagagaaaaggaaaactgtgaatggtgatgatttgttgtgggcaatggcaacattaggatttgaggattacctggaacctctaaagatatacctagcgaggtacagggagttggagggtgataataagggatcaggaaagagtggagatggatcaaatagagatgctggtggcggtgtttctggtgaagaaatgccgagctggtaaaagaagttgcaagtagtgattaagaacaatcgccaaatgatcaagggaaattagagatcagtgagttgtttatagttgagctgatcgacaactatttcgggtttactctcaatttcggttatgttagtttgaacgtttggtttattgtttccggtttagttggttgtatttaaagatttctctgttagatgttgagaacacttgaatgaaggaaaaatttgtccacatcctgttgttattttcgattcactttcggaatttcatagctaatttattctcatttaatacaaaatccttaaattaaaaaaaaaaaaaaaaaaaaaa

SEQ ID NO: 500 - DNA, 862 bp, Artificial Sequence
  Artificial sequence
  P25889
ccacgcgtccgagcgtttcgtagaaaaattcgatttctctaaagccctaaaactaaaacgactatccccaattccaagttctagggtttccatcttccccaatctagtataaatggcggatacgccttcgagcccagctggagatggcggagaaagcggcggttccgttagggagcaggatcgataccttcctatagctaatatcagcaggatcatgaagaaagcgttgcctcctaatggtaagattggaaaagatgctaaggatacagttcaggaatgcgtctctgagttcatcagcttcatcactggggaggccagtgataagtgtcaaaaagagaaaaggaaaactgtgaatggtgatgatttgttgtgggcaatggcaacattaggatttgaggattacctggaacctctaaagatatacctagcgaggtacagggagttggagggtgataataagggatcaggaaagagtggagatggatcaaatagagatgctggtggcggtgtttctggtgaagaaatgccgagctggtaaaagaagttgcaagtagtgattaagaacaatcgccaaatgatcaagggaaattagagatcagtgagttgtttatagttgagctgatcgacaactatttcgggtttactctcaatttcggttatgttagtttgaacgtttggtttattgtttccggtttagttggttgtatttaaagatttctctgttagatgttgagaacacttgaatgaaggaaaaatttgtccacatcctgttgttattttcgattcactttcggaatttcatagctaatttattctcatttaatacaaaatccttaaattaaaaaaaaaaaaaaaaaaaaaa

SEQ ID NO: 501 - DNA, 860 bp, Artificial Sequence
  Artificial sequence
  P25890
ccacgcgtccgagcgtttcgtagaaaaattcgatttctctaaagccctaaaactaaaacgactatccccaattccaagttctagggtttccatcttccccaatctagtataaatggcggatacgccttcgagcccagctggagatggcggagaaagcggcggttccgttagggagcaggatcgataccttcctatagctaatatcagcaggatcatgaagaaagcgttgcctcctaatggtaagattggaaaagatgctaaggatacagttcaggaatgcgtctctgagttcatcagcttcatcactagcgaggccagtgataagtgtcaaaaagagaaaaggaaaactgtgaatggtgatgatttgttgtgggcaatgacaacattaggatttgaggattacctggaacctctaaagatatacctagcgaggtacagggagttggagggtgataataagggatcaggaaagagtggagatggatcaaatagagatgctggtggcggtgtttctggtgaagaaatgccgagctggtaaaagaagttgcaagtagtgattaagaacaatcgccaaatgatcaagggaaattagagatcagtgagttgtttatagttgagctgatcgacaactatttcgggtttactctcaatttcggttatgttagtttgaacgtttggtttattgtttccggtttagttggttgtatttaaagatttctctgttagatgttgagaacacttgaatgaaggaaaaatttgtccacatcctgttgttattttcgattcactttcggaatttcatagctaatttattctcatttaatacaaatccttaattaaaaaaaaaaaaaaaaaaaaaa

SEQ ID NO: 502 - DNA, 1170 bp, Artificial Sequence
  Artificial sequence
  P26040
atggcggatacgccttcgagcccagctggagatggcggagaaagcggcggttccgttagggagcaggatcgataccttcctatagctaatatcagcaggatcatgaagaaagcgttgcctcctaatggtaagattggaaaagatgctaaggatacagttcaggaatgcgtctctgagttcatcagcttcatcactagcgaggccagtgataagtgtcaaaaagagaaaaggaaaactgtgaatggtgatgatttgttgtgggcaatggcaacattaggatttgaggattacctggaacctctaaagatatacctagcgaggtacagggagttggagggtgataataagggatcaggaaagagtggagatggatcaaatagagatgctggtggcggtgtttctggtgaagaaatgccgagctgggcggccgctgccgctgcggcagcggccatggtgagcaagggcgaggagctgttcaccggggtggtgcccatcctggtcgagctggacggcgacgtaaacggccacaagttcagcgtgtccggcgagggcgagggcgatgccacctacggcaagctgaccctgaagttcatctgcaccaccggcaagctgcccgtgccctggcccaccctcgtgaccaccctgacctggggcgtgcagtgcttcagccgctaccccgaccacatgaagcagcacgacttcttcaagtccgccatgcccgaaggctacgtccaggagcgcaccatcttcttcaaggacgacggcaactacaagacccgcgccgaggtgaagttcgagggcgacaccctggtgaaccgcatcgagctgaagggcatcgacttcaaggaggacggcaacatcctggggcacaagctggagtacaactacatcagccacaacgtctatatcaccgccgacaagcagaagaacggcatcaaggccaacttcaagatccgccacaacatcgaggacggcagcgtgcagctcgccgaccactaccagcagaacacccccatcggcgacggccccgtgctgctgcccgacaaccactacctgagcacccagtccgccctgagcaaagaccccaacgagaagcgcgatcacatggtcctgctggagttcgtgaccgccgccgggatcactctcggcatggacgagctgtacaagtaa

SEQ ID NO: 503 - DNA, 426 bp, Artificial Sequence
  Artificial sequence
  P25891
atggcggatacgccttcgagcccagctggagatggcggagaaagcggcggttccgttcgtgagcaagataggtttctaccgatcgctaacgttagcaggatcatgaagaaagcacttcctgcgaacgcaaaaatctctaaggatgctaaagaaacggttcaagagtgtgtatcggaattcataagtttcatcaccggtgaggcttctgacaagtgtcagagagagaagaggaagacaatcaacggtgacgatcttctttgggcgatgactacgctagggtttgaggactacgtggagcctctcaaggtttatctgcaaaagtatagggagttggagggtgataataagggatcaggaaagagtggagatggatcaaatagagatgctggtggcggtgtttctggtgaagaaatgccgagctggtaa

SEQ ID NO: 504 - DNA, 339 bp, Artificial Sequence
  Artificial sequence
  P25893
atggcggatacgccttcgagcccagctggagatggcggagaaagcggcggttccgttagggagcaggatcgataccttcctatagctaatatcagcaggatcatgaagaaagcgttgcctcctaatggtaagattggaaaagatgctaaggatacagttcaggaatgcgtctctgagttcatcagcttcatcactagcgaggccagtgataagtgtcaaaaagagaaaaggaaaactgtgaatggtgatgatttgttgtgggcaatggcaacattaggatttgaggattacctggaacctctaaagatatacctagcgaggtacagggaggtatggtga

SEQ ID NO: 505 - DNA, 847 bp, Artificial Sequence
  Artificial sequence
  P23325
tcgacccacgcgtccgagcgtttcgtagaaaaattcgatttctctaaagccctaaaactaaaacgactatccccaattccaagttctagggtttccatcttccccaatctagtataaatggcggatacgccttcgagcccagctggagatggcggagaaagcggcggttccgttagggagcaggatcgataccttcctatagctaatatcagcaggatcatgaagaaagcgttgcctcctaatggtaagattggaaaagatgctaaggatacagttcaggaatgcgtctctgagttcatcagcttcatcactagcgaggccagtgataagtgtcaaaaagagaaaaggaaaactgtgaatggtgatgatttgttgtgggcaatggcaacattaggatttgaggattacctggaacctctaaagatatacctagcgaggtacagggagttggagggtgataataagggatcaggaaagagtggagatggatcaaatagagatgctggtggcggtgtttctggtgaagaaatgccgagctggtaaaagaagttgcaagtagtgattaagaacaatcgccaaatgatcaagggaaattagagatcagtgagttgtttatagttgagctgatcgacaactatttcgggtttactctcaatttcggttatgttagtttgaacgtttggtttattgtttccggtttagttggttgtatttaaagatttctctgttagatgttgagaacacttgaatgaaggaaaaatttgtccacatcctgttgttattttcgattcactttcggaatttcatagctaatttattctcatttaataccaaatccttaaattaa

SEQ ID NO: 506 - DNA, 831 bp, Artificial Sequence; identical to SEQ ID NO: 493
  Artificial sequence
  P6812

SEQ ID NO: 507 - DNA, 1017 bp, Artificial Sequence
  Artificial sequence
  P25285
cccaatctagtataaatggcggatacgccttcgagcccagctggagatggcggagaaagcggcggttccgttagggagcaggatcgataccttcctatagctaatatcagcaggatcatgaagaaagcgttgcctcctaatggtaagattggaaaagatgctaaggatacagttcaggaatgcgtctctgagttcatcagcttcatcactagcgaggccagtgataagtgtcaaaaagagaaaaggaaaactgtgaatggtgatgatttgttgtgggcaatggcaacattaggatttgaggattacctggaacctctaaagatatacctagcgaggtacagggagttggagggtgataataagggatcaggaaagagtggagatggatcaaatagagatgctggtggcggtgtttctggtgaagaaatgccgagctgggcggccgctgccgctgcggcagcggccatggaaaagagaagatggaaaaagaatttcatagccgtctcagcagccaaccgctttaagaaaatctcatcctccggggcacttgattatgatattccaactactgctagcgagaatttgtattttcagggtgagctcaaaaccgcggctcttgcgcaacacgatgaagccgtggacaacaaattcaacaaagaacaacaaaacgcgttctatgagatcttacatttacctaacttaaacgaagaacaacgaaacgccttcatccaaagtttaaaagatgacccaagccaaagcgctaaccttttagcagaagctaaaaagctaaatgatgctcaggcgccgaaagtagacaacaaattcaacaaagaacaacaaaacgcgttctatgagatcttacatttacctaacttaaacgaagaacaacgaaacgccttcatccaaagtttaaaagatgacccaagccaaagcgctaaccttttagcagaagctaaaaagctaaatggtgctcaggcgccgaaagtagacgcgaattccgcggggaagtcaacctga

SEQ ID NO: 508 - DNA, 879 bp, Artificial Sequence
  Artificial sequence
  P25455
cccaatctagtataaatggcggatacgccttcgagcccagctggagatggcggagaaagcggcggttccgttagggagcaggatcgataccttcctatagctaatatcagcaggatcatgaagaaagcgttgcctcctaatggtaagattggaaaagatgctaaggatacagttcaggaatgcgtctctgagttcatcagcttcatcactagcgaggccagtgataagtgtcaaaaagagaaaaggaaaactgtgaatggtgatgatttgttgtgggcaatggcaacattaggatttgaggattacctggaacctctaaagatatacctagcgaggtacagggagttggagggtgataataagggatcaggaaagagtggagatggatcaaatagagatgctggtggcggtgtttctggtgaagaaatgccgagctgggcggccgcggctgccgccgcagccgctgctagttacccatacgatgttcctgactatgcgggctatccctatgacgtcccggactatgcaggatcctatccatatgacgttccggattacgcttctagatacccatacgatgttcctgactatgcgggctatccctatgacgtcccggactatgcaggatcctatccatatgacgttccagattacgctactagttacccatacgatgttcctgactatgcgggctatccctatgacgtcccggactatgcaggatcctatccatatgacgttccagattacgcttctagatacccatacgatgttcctgactatgcgggctatccctatgacgtcccggactatgcaggatcctatccatatgacgttccagattacgctactagacaggcctcgtaccagatcctctag

SEQ ID NO: 509 - DNA, 1217 bp, Artificial Sequence
  Artificial sequence
  P26263
atgagttacccatacgatgttcctgactatgcgggctatccctatgacgtcccggactatgcaggatcctatccatatgacgttccagattacgcttctagatacccatacgatgttcctgactatgcgggctatccctatgacgtcccggactatgcaggatcctatccatatgacgttccagattacgctactagttacccatacgatgttcctgactatgcgggctatccctatgacgtcccggactatgcaggatcctatccatatgacgttccagattacgcttctagatacccatacgatgttcctgactatgcgggctatccctatgacgtcccggactatgcaggatcctatccatatgacgttccagattacgctactagacaggcctcgtaccggatcctctacctagagaattccgccgctgccgctgcggcagcggctgcagcgggtaccgtcgacgcggatacgccttcgagcccagctggagatggcggagaaagcggcggttccgttagggagcaggatcgataccttcctatagctaatatcagcaggatcatgaagaaagcgttgcctcctaatggtaagattggaaaagatgctaaggatacagttcaggaatgcgtctctgagttcatcagcttcatcactagcgaggccagtgataagtgtcaaaaagagaaaaggaaaactgtgaatggtgatgatttgttgtgggcaatggcaacattaggatttgaggattacctggaacctctaaagatatacctagcgaggtacagggagttggagggtgataataagggatcaggaaagagtggagatggatcaaatagagatgctggtggcggtgtttctggtgaagaaatgccgagctggtaaaagaagttgcaagtagtgattaagaacaatcgccaaatgatcaagggaaattagagatcagtgagttgtttatagttgagctgatcgacaactatttcgggtttactctcaatttcggttatgttagtttgaacgtttggtttattgtttccggtttagttggttgtatttaaagatttctctgttagatgttgagaacacttgaatgaaggaaaaatttgtccacatcctgttgttattttcgattcactttcggaatttcatagctaatttattctcatttaatacaaaatccttaaattaaaaaaaaaaaaaaaaaaaaaaaa

SEQ ID NO: 510 - DNA, 1979 bp, Artificial Sequence
  Artificial sequence
  P21167
tttgttcccgtaagctccggccacgagttcttccctgcgatcacgttacgttagatcggtcaatcatttacgtttgggattttggagatcaagaagctcatatttgagtaaatgaaaacaaaagaactagaaacatcaccatggattgaccatatgtaacataattaaccttctaacagactttagaaaatgtaatcatatatgttatagctattgaattacaattttaaatgccttgaatccatatctaattgaacattagctaactatttacaaacatataaaactttaattatgaactatacaatacaaatacaaaaacttactaggacattcggtcgacatttttcttcactcttgtatatatttatgtagtcttctgatgtatttgtatgctcacctttagagatttgagtcccatttatagaatcggatacgtacgttacgtcttggtgtcggtgtcgtcggtgaggttgcagattcaaaagtcaaactttgacgaaaccagcttttaatagccccttcgttgacattattaatttgtttggtaaaagctttgacacttctgattttgttttataaagctttgaaatgtacatatttatatcacgatgttcaaaccttatcgagaacaagataaggtttctaaggctaagataatgtcgaaatttgaaaaacaaacgaaggtgaaaaatatttctagcgtcgactgaattctgtttgcatgcaaaaaaacgcttctgccaaatttggcacttagccgacaaaaatgaccaaactgtccttcataaaattcatgtataaaaatactataatcaattgttgtcacacacacaaacaacgataatgtcaattatgttgaattgttgacgtacataaaatttgacaaacaacatcacaacttagtcatatagttttttttttgttcccgtttgataatcttgtcatatagttaatattcaatttgatatgtatatacagtttaaaacacgtatatacagttcaacttagtcatagtttttcttttggtctgtttaagattggtaaaagcacgtatccggaataaagatttaggtattaattggtaacaactctatatgcgggtttcgaacaaaattacaaaatcacatattatatgagaccaagtcaccatcacacttaaatatttgtggttgagaattaattagtgtttagttttgtgtatgtttcacactgcccaatgttacaaacttgtgtgtgtcaagaagacgaggccgcctgaaaacaaaacatgtaagcccattgaaacagacaccaaaagacatatggtctataagcctctccttgtgctggagctggacacaaattctttaagaccgaggttttcaaacgtaggcccaaataaatagaaccaaatccagttagaagcccaataaaatgttaattacttatctttgtattttaatttttgttctttaaagtttaggattttttacataagtaaaagaatttgttctttaggcactttgaatccacattgtcgttggtattgttattagagtatcttaattttctatgatttatttacgtagataattcattgaaaaattaaatgaatttatgtttaaattctcatctaattattatacaatagattgaaaaagtcacccttagtcaaattgttcatatagttttcttaaattgtctaattaattaccaaattaatccttgtctgaaaacttttacaaaagctaatacagaacaaatacaaaaaaacgtgtaatcatatcatataaacaccagtcgcagcgtttcgtagaaaaattcgatttctctaaagccctaaaactaaaacgactatccccaattccaagttctagggtttccatcttccccaatctgtacgccattttcgatttccttttttgttgtttactttagcttcatcgaccatgtttaggtttcaaattgagtgtttgttctgtttctgtagagtataa

SEQ ID NO: 511 - DNA, 1979 bp, Artificial Sequence; identical to SEQ ID NO: 510
  Artificial sequence
  P25610

SEQ ID NO: 512 - DNA, 847 bp, Artificial Sequence; identical to SEQ ID NO: 505
  Artificial sequence
  P21522

SEQ ID NO: 513 - DNA, 1034 bp, Artificial Sequence
  Artificial sequence
  P47
acacttaacaattcacaccttctctttttactcttcctaaaaccctaaatttcctcgcttcagtcttcccactcaagtcaaccaccaattgaattcgatttcgaatcattgatggaaatgatttgaaaaaagagtaaagtttatttttttattccttgtaattttcagaaatgggggattccgacagggattccggtggagggcaaaacgggaacaaccagaacggacagtcctccttgtctccaagagagcaagacaggttcttgccgatcgctaacgtcagccggatcatgaagaaggccttgcccgccaacgccaagatctctaaagatgccaaagagacgatgcaggagtgtgtctccgagttcatcagcttcgtcaccggagaagcatctgataagtgtcagaaggagaagaggaagacgatcaacggagacgatttgctctgggctatgactactctaggttttgaggattatgttgagccattgaaagtttacttgcagaggtttagggagatcgaaggggagaggactggactagggaggccacagactggtggtgaggtcggagagcatcagagagatgctgtcggagatggcggtgggttctacggtggtggtggtgggatgcagtatcaccaacatcatcagtttcttcaccagcagaaccatatgtatggagccacaggtggcggtagcgacagtggaggtggagctgcctccggtaggacaaggacttaacaaagattggtgaagtggatctctctctgtatatagatacataaatacatgtatacacatgcctatttttacgacccatataaggtatctatcatgtgatagaacgaacattggtgttggtgatgtaaaatcagatgtgcattaagggtttagattttgaggctgtgtaaaagaagatcaagtgtgctttgttggacaataggattcactaacgaatctgcttcattggatcttgtatgtaactaaagccattgtattgaatgcaaatgttttcatttgggatgctttaaa

SEQ ID NO: 514 - DNA, 1317 bp, Artificial Sequence
  Artificial sequence
  P26041
atgggggattccgacagggattccggtggagggcaaaacgggaacaaccagaacggacagtcctccttgtctccaagagagcaagacaggttcttgccgatcgctaacgtcagccggatcatgaagaaggccttgcccgccaacgccaagatctctaaagatgccaaagagacgatgcaggagtgtgtctccgagttcatcagcttcgtcaccggagaagcatctgataagtgtcagaaggagaagaggaagacgatcaacggagacgatttgctctgggctatgactactctaggttttgaggattatgttgagccattgaaagtttacttgcagaggtttagggagatcgaaggggagaggactggactagggaggccacagactggtggtgaggtcggagagcatcagagagatgctgtcggagatggcggtgggttctacggtggtggtggtgggatgcagtatcaccaacatcatcagtttcttcaccagcagaaccatatgtatggagccacaggtggcggtagcgacagtggaggtggagctgcctccggtaggacaaggactgcggccgctgccgctgcggcagcggccatggtgagcaagggcgaggagctgttcaccggggtggtgcccatcctggtcgagctggacggcgacgtaaacggccacaagttcagcgtgtccggcgagggcgagggcgatgccacctacggcaagctgaccctgaagttcatctgcaccaccggcaagctgcccgtgccctggcccaccctcgtgaccaccctgacctggggcgtgcagtgcttcagccgctaccccgaccacatgaagcagcacgacttcttcaagtccgccatgcccgaaggctacgtccaggagcgcaccatcttcttcaaggacgacggcaactacaagacccgcgccgaggtgaagttcgagggcgacaccctggtgaaccgcatcgagctgaagggcatcgacttcaaggaggacggcaacatcctggggcacaagctggagtacaactacatcagccacaacgtctatatcaccgccgacaagcagaagaacggcatcaaggccaacttcaagatccgccacaacatcgaggacggcagcgtgcagctcgccgaccactaccagcagaacacccccatcggcgacggccccgtgctgctgcccgacaaccactacctgagcacccagtccgccctgagcaaagaccccaacgagaagcgcgatcacatggtcctgctggagttcgtgaccgccgccgggatcactctcggcatggacgagctgtacaagtaa

SEQ ID NO: 515 - DNA, 1034 bp, Artificial Sequence; identical to SEQ ID NO: 513
  Artificial sequence
  P5072

SEQ ID NO: 516 - DNA, 553 bp, Artificial Sequence
  Artificial sequence
  P48
tgggctaaccaaatgcaagagatcgagcataccactgatttcaagaaccacacccttcccctagcccgcatcaagaagatcatgaaagctgatgaagatgtgaggatgatctctgcggaggctcctgtgatttttgccaaggcctgtgagatgttcattttggagctcactctacgtgcttggatccacaccgaggagaacaagaggaggaccttgcagaagaacgacatcgccgctgccatttccaggaccgacgtgtttgatttccttgtggacataatcccgagggacgagctgaaagaagaaggtttaggcgtgaccaaagggaccataccatcggtggtgggttccccgccatactattacttgcaacaacaggggatgatgcaacactggccccaggagtaacaccctgatgagtcttaaaacttttcccctttcgtttgtttggttgtatcgtagtaaggtagctctgctctgctgggaaccatttctattgtgttctgtaatgacatgttagtatatccccagtctatatctatggcaatgcagt

SEQ ID NO: 517 - DNA, 1344 bp, Artificial Sequence
  Artificial sequence
  P26226
atggagcagtcagaagagggtcaacagcaacagcaacagggagtgatggattatgtacctcctcatgcttatcagagtgggccagtaaatgcagcttcccatatggcattccaacaagctcaccacttccaccaccaccatcagcagcaacaacagcagcagcttcagatgttctgggctaaccaaatgcaagagatcgagcataccactgatttcaagaaccacacccttcccctagcccgcatcaagaagatcatgaaagctgatgaagatgtgaggatgatctctgcggaggctcctgtgatttttgccaaggcctgtgagatgttcattttggagctcactctacgtgcttggatccacaccgaggagaacaagaggaggaccttgcagaagaacgacatcgccgctgccatttccaggaccgacgtgtttgatttccttgtggacataatcccgagggacgagctgaaagaagaaggtttaggcgtgaccaaagggaccataccatcggtggtgggttccccgccatactattacttgcaacaacaggggatgatgcaacactggccccaggagcaacaccctgatgagtctgcggccgctgccgctgcggcagcggccatggtgagcaagggcgaggagctgttcaccggggtggtgcccatcctggtcgagctggacggcgacgtaaacggccacaagttcagcgtgtccggcgagggcgagggcgatgccacctacggcaagctgaccctgaagttcatctgcaccaccggcaagctgcccgtgccctggcccaccctcgtgaccaccttcggctacggcctgcagtgcttcgcccgctaccccgaccacatgaagcagcacgacttcttcaagtccgccatgcccgaaggctacgtccaggagcgcaccatcttcttcaaggacgacggcaactacaagacccgcgccgaggtgaagttcgagggcgacaccctggataaccgaatcgagctgaagggcatcgacttcaaggaggacggcaacatcctggggcacaagctggagtacaactacaacagccacaacgtctatatcatggccgacaagcagaagaacggcatcaaggtgaacttcaagatccgccacaacatcgaggacggcagcgtgcagctcgccgaccactaccagcagaacacccccatcggcgacggccccgtggtgctgcccgacaaccactacctgagctaccagtccgccctgagcaaagaccccaacgagaagcgcgatcacatggtcctgctggagttcgtgaccgccgccgggatcactctcggcatggacgagctgtacaagtaa

SEQ ID NO: 518 - DNA, 1224 bp, Artificial Sequence
  Artificial sequence
  P26276
atggatccaatggatatagtcggcaaatccaaggaagacgcttctcttccaaaagctacgatgactaaaattataaaggagatgttaccaccagatgttcgtgttgcaagagatgctcaagatcttctcattgaatgttgtgtagagtttataaatcttgtatcttcagaatctaatgatgtttgtaacaaagaggataaacggacgattgctcctgagcatgttctcaaggcattacaggttcttggttttggagaatacattgaagaagtctatgctgcgtatgagcaacataagtatgaaacaatgcaggacacacagaggagcgtgaaatggaaccctggagctcaaatgactgaggaggaagcagcagctgagcaacaacgtatgtttgcagaagcacgtgcaagaatgaatggaggtgtttcggttcctcaacctgaacatccagaaactgaccagagaagtccgcaaagcgcggccgctgccgctgcggcagcggccatggtgagcaagggcgaggagctgttcaccggggtggtgcccatcctggtcgagctggacggcgacgtaaacggccacaagttcagcgtgtccggcgagggcgagggcgatgccacctacggcaagctgaccctgaagttcatctgcaccaccggcaagctgcccgtgccctggcccaccctcgtgaccaccctgacctggggcgtgcagtgcttcagccgctaccccgaccacatgaagcagcacgacttcttcaagtccgccatgcccgaaggctacgtccaggagcgcaccatcttcttcaaggacgacggcaactacaagacccgcgccgaggtgaagttcgagggcgacaccctggtgaaccgcatcgagctgaagggcatcgacttcaaggaggacggcaacatcctggggcacaagctggagtacaactacatcagccacaacgtctatatcaccgccgacaagcagaagaacggcatcaaggccaacttcaagatccgccacaacatcgaggacggcagcgtgcagctcgccgaccactaccagcagaacacccccatcggcgacggccccgtgctgctgcccgacaaccactacctgagcacccagtccgccctgagcaaagaccccaacgagaagcgcgatcacatggtcctgctggagttcgtgaccgccgccgggatcactctcggcatggacgagctgtacaagtaa

SEQ ID NO: 519 - DNA, 682 bp, Artificial Sequence
  Artificial sequence
  P1441
tcctctctgatccaacggacccaaaacatctatctctctttctcgaccttttgtctcctcgatctaaagatggcggattcggacaacgattcaggaggacacaaagacggtggaaatgcttcgacacgtgagcaagataggtttctaccgatcgctaacgttagcaggatcatgaagaaagcacttcctgcgaacgcaaaaatctctaaggatgctaaagaaacggttcaagagtgtgtatcggaattcataagtttcatcaccggtgaggcttctgacaagtgtcagagagagaagaggaagacaatcaacggtgacgatcttctttgggcgatgactacgctagggtttgaggactacgtggagcctctcaaggtttatctgcaaaagtatagggaggtggaaggagagaagactactacggcagggagacaaggcgataaggaaggtggaggaggaggcggtggagctggaagtggaagtggaggagctccgatgtacggtggtggcatggtgactacgatgggacatcaattttcccatcatttttcttaattgtaaaatgataaaagcaaattttcatttttattaattaatgatatatatatatatatgtttaacttttagtataatgtttacagaattttttttttaaaactaggttcaacccactaacgtaaca

SEQ ID NO: 520 - DNA, 1230 bp, Artificial Sequence
  Artificial sequence
  P26044
atggcggattcggacaacgattcaggaggacacaaagacggtggaaatgcttcgacacgtgagcaagataggtttctaccgatcgctaacgttagcaggatcatgaagaaagcacttcctgcgaacgcaaaaatctctaaggatgctaaagaaacggttcaagagtgtgtatcggaattcataagtttcatcaccggtgaggcttctgacaagtgtcagagagagaagaggaagacaatcaacggtgacgatcttctttgggcgatgactacgctagggtttgaggactacgtggagcctctcaaggtttatctgcaaaagtatagggaggtggaaggagagaagactactacggcagggagacaaggcgataaggaaggtggaggaggaggcggtggagctggaagtggaagtggaggagctccgatgtacggtggtggcatggtgactacgatgggacatcaattttcccatcatttttctgcggccgctgccgctgcggcagcggccatggtgagcaagggcgaggagctgttcaccggggtggtgcccatcctggtcgagctggacggcgacgtaaacggccacaagttcagcgtgtccggcgagggcgagggcgatgccacctacggcaagctgaccctgaagttcatctgcaccaccggcaagctgcccgtgccctggcccaccctcgtgaccaccctgacctggggcgtgcagtgcttcagccgctaccccgaccacatgaagcagcacgacttcttcaagtccgccatgcccgaaggctacgtccaggagcgcaccatcttcttcaaggacgacggcaactacaagacccgcgccgaggtgaagttcgagggcgacaccctggtgaaccgcatcgagctgaagggcatcgacttcaaggaggacggcaacatcctggggcacaagctggagtacaactacatcagccacaacgtctatatcaccgccgacaagcagaagaacggcatcaaggccaacttcaagatccgccacaacatcgaggacggcagcgtgcagctcgccgaccactaccagcagaacacccccatcggcgacggccccgtgctgctgcccgacaaccactacctgagcacccagtccgccctgagcaaagaccccaacgagaagcgcgatcacatggtcctgctggagttcgtgaccgccgccgggatcactctcggcatggacgagctgtacaagtaa

SEQ ID NO: 521 - DNA, 486 bp, Artificial Sequence
  Artificial sequence
  P25892
atggcggattcggacaacgattcaggaggacacaaagacggtggaaatgcttcgacaagggagcaggatcgataccttcctatagctaatatcagcaggatcatgaagaaagcgttgcctcctaatggtaagattggaaaagatgctaaggatacagttcaggaatgcgtctctgagttcatcagcttcatcactagcgaggccagtgataagtgtcaaaaagagaaaaggaaaactgtgaatggtgatgatttgttgtgggcaatggcaacattaggatttgaggattacctggaacctctaaagatatacctagcgaggtacagggaggtggaaggagagaagactactacggcagggagacaaggcgataaggaaggtggaggaggaggcggtggagctggaagtggaagtggaggagctccgatgtacggtggtggcatggtgactacgatgggacatcaattttcccatcatttttcttaa

SEQ ID NO: 522 - DNA, 685 bp, Artificial Sequence
  Artificial sequence
  P4190
tcctctctgatccaacggacccaaaacatctatctctctttctcgaccttttgtctcctcgatctaaagatggcggattcggacaacgattcaggaggacacaaagacggtggaaatgcttcgacacgtgagcaagataggtttctaccgatcgctaacgttagcaggatcatgaagaaagcacttcctgcgaacgcaaaaatctctaaggatgctaaagaaacggttcaagagtgtgtatcggaattcataagtttcatcaccggtgaggcttctgacaagtgtcagagagagaagaggaagacaatcaacggtgacgatcttctttgggcgatgactacgctagggtttgaggactacgtggagcctctcaaggtttatctgcaaaagtatagggaggtggaaggagagaagactactacggcagggagacaaggcgataaggaaggtggaggaggaggcggtggagctggaagtggaagtggaggagctccgatgtacggtggtggcatggtgactacgatgggacatcaattttcccatcatttttcttaattgtaaaatgataaaagcaaattttcatttttattaattaatgatatatatatatatatgtttaacttttagtataatgtttacagaattttttttttaaaactaggttcaacccactaacgtaacagcg

SEQ ID NO: 523 - DNA, 732 bp, Artificial Sequence
  Artificial sequence
  P51
ctggtagtgaatggatcaacaagaccatggacagtctggagctatgaactatggcacaaacccataccaaaccaacccgatgagcaccactgctgctactgtagcaggaggtgcggcacaaccaggccagctggcgttccaccagatccatcagcagcagcagcagcaacagctggcacagcagcttcaagcattttgggagaaccaattcaaagagattgagaagactaccgatttcaagaaccacagccttccccttgcgagaatcaagaaaatcatgaaagcggatgaagatgtccgtatgatctcggctgaggcgccggtcgtgtttgcaagggcctgtgagatgttcatcctggagctgacactcaggtcgtggaaccacactgaggagaataagaggcggacgttgcagaagaacgatattgctgctgctgtgactagaaccgatatttttgatttccttgtggatattgttccccgggaggatctccgagatgaagtcttgggaagtattccgaggggcactgtcccggaagctgctgctgctggttacccgtatggatacttgcctgcaggaactgctccaataggaaatccgggaatggttatgggtaatcccggtggtgcgtatccacctaatccttatatgggtcaaccaatgtggcaacaacaggcacctgaccaacctgaccaggaaaattagcaagaaactgtgagtcttccagcttc

SEQ ID NO: 524 - DNA, 1407 bp, Artificial Sequence
  Artificial sequence
  P26060
atgaactatggcacaaacccataccaaaccaacccgatgagcaccactgctgctactgtagcaggaggtgcggcacaaccaggccagctggcgttccaccagatccatcagcagcagcagcagcaacagctggcacagcagcttcaagcattttgggagaaccaattcaaagagattgagaagactaccgatttcaagaaccacagccttccccttgcgagaatcaagaaaatcatgaaagcggatgaagatgtccgtatgatctcggctgaggcgcctgtcgtgtttgcaagggcctgtgagatgttcatcctggagctgacactcaggtcgtggaaccacactgaggagaataagaggcggacgttgcagaagaacgatattgctgctgctgtgactagaaccgatatttttgatttccttgtggatattgttccccgggaggatctccgagatgaagtcttgggaagtattccgaggggcactgtcccggaagctgctgctgctggttacccgtatggatacttgcctgcaggaactgctccaataggaaatccgggaatggttatgggtaatcccggtggtgcgtatccacctaatccttatatgggtcaaccaatgtggcaacaacaggcacctgaccaacctgaccaggaaaatgcggccgctgccgctgcggcagcggccatggtgagcaagggcgaggagctgttcaccggggtggtgcccatcctggtcgagctggacggcgacgtaaacggccacaagttcagcgtgtccggcgagggcgagggcgatgccacctacggcaagctgaccctgaagttcatctgcaccaccggcaagctgcccgtgccctggcccaccctcgtgaccaccttcggctacggcctgcagtgcttcgcccgctaccccgaccacatgaagcagcacgacttcttcaagtccgccatgcccgaaggctacgtccaggagcgcaccatcttcttcaaggacgacggcaactacaagacccgcgccgaggtgaagttcgagggcgacaccctggataaccgaatcgagctgaagggcatcgacttcaaggaggacggcaacatcctggggcacaagctggagtacaactacaacagccacaacgtctatatcatggccgacaagcagaagaacggcatcaaggtgaacttcaagatccgccacaacatcgaggacggcagcgtgcagctcgccgaccactaccagcagaacacccccatcggcgacggccccgtggtgctgcccgacaaccactacctgagctaccagtccgccctgagcaaagaccccaacgagaagcgcgatcacatggtcctgctggagttcgtgaccgccgccgggatcactctcggcatggacgagctgtacaagtaa

SEQ ID NO: 525 - DNA, 732 bp, Artificial Sequence; identical to SEQ ID NO: 523
  Artificial sequence
  P3404

SEQ ID NO: 526 - DNA, 1231 bp, Artificial Sequence
  Artificial sequence
  P25421
tttgatcgctgcagagaaatggaaactcctgtgggtttaagattctgtccgaccgacgaggagatcgtcgtcgattacctttggccgaaaaattccgatagagacacgagccatgtcgatcgattcattaacacagtccctgtctgtagactcgatccttgggagttaccttgccagtcaaggatcaaactgaaagatgtggcttggtgtttcttcagacctaaggagaacaaatatggcagaggtgatcagcagatgagaaaaacgaaatctgggttttggaagagtactggcagaccaaagcctatcatgcgtaatcgccaacagatcggtgagaaaaagattttgatgttttacacgagtaaggaatccaaatccgattgggttatacacgagtaccacggtttctctcataaccagatgatgatgacatacacactctgtaaagttatgtttaatggtggcatgagagagaagtcttcctcttctccttcttcttctggtgttagtggaattgagcagagtcgtcgtgactctttaatccctcagcttgtcaacaattctgagggatcctcacttcacagagaagatccaagtcagtttggtgatgtgctgcaagaagctccaatcgaggatgctaaactgaccgaggaattggtaaaatggctgatgaatgatgaggatgatgctcaaatcgaggatgctataccgattgaggaatgggaaacatggttgaatgatattgatgatgctaaggagaagagtatcatgtttatgcatgataatcgaagtgattacagacctccaaactcattaactggtgtcttcagtgatgatgttagcagtgatgataatgattctgatttgctaactccaaaaacaaactctattcaaacttcgagcacttgtgatagttttggtagctcaaatcatcgcatagaccagatcaaagacctgcaagaatctcctacctcaacaatcaacttagtgtcactaactcaagaggtgagccaagctctaataaccagtattgataccgccgagaagaagaagaatccttatgatgatgcacaagggactgagattggtgagcataaattgggtcaagagacgatcaagaagaaaagagctggtttctttcacaggatgatacaaaaattcgtcaagaaaattcacctatgttcttccatctcaagaacttgataacaataaaagtgatcaataacacctt

SEQ ID NO: 527 - DNA, 1723 bp, Artificial Sequence
  Artificial sequence
  P279
ccctctcttagttttgatctgaacctttttgtagctgttgaaaaatggcgaatccggtgggttttagattccgtccgactgacggggagatcgtcgacatttacctccgaccgaaaaatctcgaaagtaacacgagccatgtcgatgaagtcattagcacagttgatatttgtagcttcgacccttgggacttaccttgtaagtctttctaacgcgagtgtttgtttttctttggttcccaactgttgtatcatcccggtaatttctgatcatgttctgtctttcccagcccattctaggatgaaaacaagagatcaggtttggtatttcttcggccgtaaggagaacaaatatggtaaaggtgatcgacagataagaaaaaccaagtctggtttttggaagaaaactggcgttaccatggatataatgcgcaaaacgggagatcgtgagaagatcggtgagaaaagggttttggtgtttaagaatcacggtggttccaagtccgattgggctatgcatgagtatcacgctacgttctcgtctcctaatcaggtcatttttcgattctcttgtttaggcttctttaacttgttgttgttgttttcttaccgtgattttatttctcgtaaacgggaaaaatctgagtttatggtaatcatttatgctgagttgatctgtagataatgacatacacactctgcaaagttaagtttaagggtgaaaggagagaattttcagttgctactggtagtggaattaagcatactcactctttaatccctcctaccaacaattctggagttttgagtgtagagacagaggtgagtcaatctcaaaaactttccctgtttctcttttaaatcttcaaaatcatatctcgtacacatagttttttcatctgtgttacgttgttccttttttcagggatcgttgtttcacagccaagaatcacagaatccaagtcagttttctggctttcttgatgtggatgcactagatagggacttctgcaatattttgagtgatgatttcaaaggcttctttaatgatgacgatgagcagagtaagattgtttctatgcaagatgatcgcaacaaccacacacctcaaaagccattgaccggtgtcttcagtgatcatagcaccgatggtagtgattctgatccgatttctgcaacaactgtaagcaaaattttcctattttacctttactatctcctctgttttcagttttttctcacaaagctatagttttgtttaatacgacagatttccattcaaactttaagcacttgtcctagttttggtagctcaaatcctctataccaaatcactgacttgcaggaatctcctaactcaatcaagttagtgtcattagctcaagaggtgagctttatcatctccttttcttaaagaccaaccattctaaactgctaattaaccaagctactttgtgccagtactcacagcattttgggttctatgatgtgatttaaggtgagcaaaacaccgggaaccggtattgataatgatgcacaagggactgagattggtgagcataaattgggtcaagagacgatcaagaacaaaagagctggtttctttcacaggatgatacaaaaattcgtcaagaaaattcacctaagaacatgatatcaattttgtactttccaaaatctgtagtagtatgtaatatgtgtctatctggttttgtaacttttac

SEQ ID NO: 528 - DNA, 1162 bp, Artificial Sequence
  Artificial sequence
  P2035
tgaaactttagtcgctctcggacaatgatgaatccggtgggtttcagattccgtccaaacgacgaggagatcgtcgaccattacctccggccaaaaaatctcgatagtgacactagccatgtcgatgaagtcattagcacagtcgatatctgtagcttcgagccttgggatttaccttccaagtcgatgatcaaatcgagagatggggtttggtatttctttagtgttaaggagatgaagtataacagaggtgatcaacagagaagaagaacaaactctgggttttggaagaaaactggaaaaacaatgactgtcatgcgcaaaagaggaaatcgtgagaagatcggtgagaaaagggttttggtttttaagaatcgagatggttcaaagaccgactgggttatgcacgagtatcacgctacgtccttgtttcctaatcagatgatgacgtatacagtctgcaaagttgagtttaagggtgaagagacagagatctcttcttcttctactggtagtgaaattgaacagattcactctttaatccctcttgtgaacagttctggaggatctgagggttcgtcgtttcacagccaagaattacagaattcaagtcagtctggtgtctttgctaatgtgcagggagaatctcaaatcgatgatgcaactacaccgattgaggaggaatggaaaacatggttgaataatgatggtgatgagcagaggaatatcatgtttatgcaagatcatcgcagcgattacacacctctaaagtcgttaactggtgtcttcagtgatgatagcagtgatgataatgattctgatttgatatctcctaaaacaaattctattggaacttcgagcacttgtgctagttttgctagctcaaatcatcagatagaccaaactcaacattctcctgactcaacagtccagctagtgtcattaactcaagaggtgagccaaggtccgggtcaagtgactgtgattcgagagcataaattgggtgaagagtctgtcaagaagaaaagagctagtttcgtttacaggatgatacacagattagtcaagaaaattcaccaatgttattctatctcaagaacatgataacaatagatgagaccaagaacaccttttagtacttttccaaatttgtagaaatata

SEQ ID NO: 529 - DNA, 1200 bp, Artificial Sequence
  Artificial sequence
  P1042
aaaaaaacagaagccatgaactcctcgtctcttctaactccttcatcatctccttctccacatcttcaatctcctgcaacattcgaccacgatgatttcctccaccacatcttctcctccactccttggccctcatccgttctcgacgacactcctccaccaacttccgattgtgcccccgtcactggattccaccaccacgacgccgattcaagaaaccagatcactatgattcctttgtcacataaccatcctaatgacgctctcttcaatggcttctccaccggatctctccctttccacctccctcaaggatcgggaggtcaaacgcaaacgcagtcgcaggcgacggcgtcagccaccaccggtggtgcaacggcgcaacctcagacaaagcctaaagtccgagctaggagaggtcaagccactgatcctcacagtatcgccgaacggttacggagagagaggatagcggaaagaatgaaatctcttcaagaacttgtccctaatggtaacaagacagacaaagcatcaatgctcgatgagattatcgattatgtcaagttcttacagctccaagtcaaggtactaagcatgagtagactgggcggtgctgcttctgcttcttctcaaatctctgaggatgccggtggatcccacgaaaacacctcctcctccggcgaggcgaagatgacggagcaccaagttgcaaagctaatggaagaggacatgggatcagccatgcaatatctacaaggcaaaggtctttgcctcatgcccatctcgttagccaccaccatctccaccgccacgtgtccttctcgtagccccttcgttaaagataccggcgttcctttgtctcctaacctatccactacaatagttgctaacggtaatggctcatcgttggtcaccgttaaagacgctccctccgtttccaagccgtgataacggccatttgtccatttcattttcccttttttgggtgggaaagagagaaaaaagtttagaagacaaagacaagtgggataggtggttttggtcaaagtttagaaagaataaggtcgtgttttcggatacgacaccgtatttgcgtacactttggttttctgtctttacctactacaaaccacccataagcacactcatgttatcatgtttttttttttttggtttataaagatataaaaaaaaaaaaaa

SEQ ID NO: 530 - DNA, 1240 bp, Artificial Sequence
  Artificial sequence
  P77
gtaaatctctctttgaaggttcctaactcgttaatcgtaactcacagtgactcgttcgagtcaaagtctctgtctttagctcaaaccatggctagtaacaaccctcacgacaacctttctgaccaaactccttctgatgatttcttcgagcaaatcctcggccttcctaacttctcagcctcttctgccgccggtttatctggagttgacggaggattaggtggtggagcaccgcctatgatgctgcagttgggttccggagaagaaggaagtcacatgggtggcttaggaggaagtggaccaactgggtttcacaatcagatgtttcctttggggttaagtcttgatcaagggaaaggacctgggtttcttagacctgaaggaggacatggaagtgggaaaagattctcagatgatgttgttgataatcgatgttcttctatgaaacctgttttccacgggcagcctatgcaacagccacctccatcggccccacatcagcctacttcaatccgtcccagggttcgagctaggcgtggtcaggctactgatccacatagcatcgctgagcggctacgtagagaaagaatagcagaacggatcagggcgctgcaggaacttgtacctactgtgaacaagaccgatagagctgctatgatcgatgagattgtcgattatgtaaagtttctcaggctccaagtcaaggttttgagcatgaaccgacttggtggagccggtgcggttgctccacttgttactgatatgcctctttcatcatcagttgaggatgaaacgggtgagggtggaaggactccgcaaccagcgtgggagaaatggtctaacgatgggactgaacgtcaagtggctaaactgatggaagagaacgttggagccgcgatgcagcttcttcaatcaaaggctctttgtatgatgccaatctcattggcaatggcaatttaccattctcaacctccggatacatcttcagtggtcaagcctgagaacaatcctccacagtaggatttctgcaataaagagtttgtacagctaatccaactgtccaacatgggtttttcttctgctctaatgactctggtttcttctctcctctctcaccgacttgaaaggtaaaaaagtgaaaaaggctttgtagatggaatcaatgtaggatttgcagtagagggcaaaaaaatgtcatatagctcaattgatcaagtcttaaaaaaaaaaaaaaaaaaaa

SEQ ID NO: 531 - DNA, 1287 bp, Artificial Sequence
  Artificial sequence
  P310
cttcctgaaacgtcacgagacagagcttacaagaagagaaaacagaggaaatttcgttgcattttttttacatattgattcgattaatggattcaaataatcatctctacgacccgaatcccaccgggtcgggtcttcttcgttttagatcagctccgagctctgttctcgccgcttttgttgacgacgacaagattggtttcgactccgataggttgctttcaagattcgtgacctctaatggcgttaacggagatctgggttcacctaaattcgaggataagtctccggtttcgttaacgaacacctctgtttcatacgccgccactctgccgccaccgccgcagcttgagccgtcgagttttctgggtttgccgccgcattacccgaggcagagtaaagggataatgaactcggttggtttggatcagtttctcggtatcaataatcatcacaccaaaccagttgaatctaatcttctccgtcaaagcagctctccagccggaatgtttactaatctctctgaccaaaacggttatggttcaatgaggaatttgatgaattacgaagaagatgaagagagtccatctaattccaatggattaagacgccattgcagtctctcttcaaggccaccttcttcacttggaatgctttctcaaatacctgaaatcgcacccgaaactaattttccatatagccattggaatgatccatccagctttattgataacttatcctcacttaaaagagaagccgaggacgatggaaaattgtttctcggagctcagaacggagagtccgggaatcgtatgcagttactgtcgcatcatttgagcctaccaaagtcatcatcgacagcctcggacatggtttcagtggataagtatcttcagctacaagattctgttccttgtaaaatcagagccaaacgtggttgcgctacacatcctcgaagcatcgctgaacgggtaagaagaacgcggataagcgagcgaatgaggaagttacaagagcttgttcctaacatggacaagcaaaccaacacttcggatatgttggatttagctgtggattacatcaaagatttacaaagacagtataagattttaaacgacaacagagctaactgtaagtgtatgaacaaggagaagaagtcaatatagggcgcaacaaagtgtgtagtagataggactaaaaagcagggagaaggacaagaaagaaacaatgtcatgtctgaatattttttagccgaaacagaccaaattgtctatgtaagctctcgag

SEQ ID NO: 532 - DNA, 2962 bp, Artificial Sequence
  Artificial sequence
  P25130
aaggagagaaacacttgcttaatatagaagtttctttttggaagaaaataaaaatagtgaagccccctttttgagcttgttgacattataaaagccaaagctggaccacgattccccacttctatcaatgtaatctattttttcttaagaacataaaaagatttttaaataaattgatgggaatcgttttgttttttatatttatactactatcaaacagtataaaaaacaaaatgtacacaacaacattgagaaactaatggggtctcacgtgtccatgttcccatccacatagccacggacgggatttgctttctaattttccacatttctttaggccaaacctttataaatggcacttgatatttgcttctttaatttcaatctctttttttttttctttttttttggggtgtttttcccgttgtatccattgcatttagaagaaaattgttgagaccactgattttcttcgaaaaagaacttcagcaatgaagagtttgttttatgcacgtctttacaaaaaaaaaaaaaactaagagattatgacctgcattgaagtgagagcacttgagaaaacttgtgtgtgatgatttggaaaatagttgttatagataactaatcatatattggtatatatggattcctttgaagaaatactggtttgatttgaacaaaaacatttgttacgtatgattaaacatacttttcattgcacggtgatacgaaattttgattcagttgaattagatcaatgtagttttgagttatattttttatgtttgcccattcgttagtgatataaaacaaagtatcatcagtatatagctagtttcgagatagtatgtacaacttttaaatattaattacctatgcttaaatagtaatagtattatgtatgtgcatgtgctttgtacatacaattttgtcttcttgttgattaattattaaacagctcgaagttttaagactatgtagcttagcctatgtcaatgtcatcaatctatatgcaatatatatagagcctcaggcacataaaccgtagtccccatataaaaaagggaatgaaacagctaataactccatagagaataaattcacattcaaagcaaattcaccaccccaatcttctcaatggttcggtttcttttttcaattcttacattgtactaaaagctaaaaattcagactgatacgatacgaataggtttttgaaaatataaaaattaatcaatttccattaaagggctgaatagctaaaaactccatagagaacaagtcgctttattggatttagattttaaaaagacggcgctcgtgaattattaaagtttaaactaagataagatttaaagagatttagaggagacgtaatctggtgtatatcgttcacatagagtcacgtcactgtataatccatcgaccactaaggttttagagtttagtttcaaatcttactttttcatgcaggtgtaccgtatgtcacacagattatagtagtcgccaacttacgttcccaatgggtgataacggcgtcaacgtcctccgtcacgatcgtgtcgtaagctgtacactgtataggttccgtgaaccttaaaatcggatttggaaagctacgtacgtacgtaaatattggttaaaaagttcaaacagttttgatctctcttttattacaaacaaactgtacttccgacaattttctttctttctatttcaagtacgttttcgtgtctaactatattaacatctaacttctgacttttatactctgatgggacaatctttaattcttaaattctaagttgtaccatgcgaatggatattagattttgtcagtacaattgctgactatgaatgaagtactctaacatcattattggttcctgaataatgagtacttaaacaaaacaaatttgaagtaacgtaaccatgacatattagatccatgtcccctaaaacgtattaaaattatttccttacgtcgttaaatttcgaatctagtgttaaattgttacattggttgttaaactaccgacccaataaaaaaaaagaaactaatatttatgattggtgcatcttgttgtaaattgtaatcgtatggcctaccagcgatttcattgtccccaacatacagatatttttgttcgtgtgttataaattagggtagaaacatcacatattttacagagacaaagaaaaaaacaagaatcgtaataaaatgatattatggatacatgtagattataagatgagaaataataatttgtcacgggtccatcagtatactcgtcaaaattgattaggtaggtaatttacttcacatgctcttcctgtatacaagtataaagtatgtattttcatctaaaatctactcttttctcaattacattttatatagaaaaattcatattcttaagaaatagtagtaaaattgttcttgaaaaaaaatatgaaaaggcattttccgtgactcagcctcacaggcggcttaaaacgacgtctttttcaattttaataaatttttggtaaaaaagcttttggatccgccgctatcttcagcaattaaagttggacgcagaaactcagaagcaaaaagacgataaatattcatcatcaccttcatctctctcttcctctcatcagacttcaccgttcttctttctctcttcttcatcttcagacgaaacctcctttacttccccttcaaggttttatatttcccaaatcctacacctgctcacatctcaagctcaagttttgttttcccgggaaaagtgacacaaacaagaacttaacaagggagaagaaaaagcttatattcatatcaacggttgacgttggaaagctattaagatttggttttctacaaatttgttcttcctgaaacgtcacgagacagagcttacaagaagagaaaacagaggaaatttcgttgcattttttttacatattgattcgatta

SEQ ID NO: 533 - DNA, 2962 bp, Artificial Sequence; identical to SEQ ID NO: 532
  Artificial sequence
  P25131

SEQ ID NO: 534 - DNA, 2709 bp, Artificial Sequence
  Artificial sequence
  P324
cggagctagagagaaagagagagtgtgtgtgtagaaaaagattgaaacatcatcaagattgatggagcaaggaggaggtggtggtggtaatgaagttgtggaggaagcttcacctattagttcaagacctcctgctaacaacttagaagagcttatgagattctcagccgccgcggatgacggtggattaggaggtggaggtggaggaggaggaggaggaagtgcttcttcttcatcgggaaatcgatggccgagagaagaaactttagctcttcttcggatccgatccgatatggattctacttttcgtgatgctactctcagagctcctctttgggaacatgtttccaggtctctcttcctctcttctcttccattttcatcaatggtgtttcttgatagagatccatttgcatgtgttttttttttgttaactttttttttttagtgttaggtatatataaatagtaatatattcgagatcaaagcatcttcaccatccccaagaaaaattaaaagaactgtttgtttattacagaagttggttcatgagtttctgggacgttttcgattttgaaaatcccaagactctctttacttccaaaaaaaaaaaaaaaaaatccgatcgaacagtaaccataaaaattttccagctaataacgacaaccaaaaataaaataaaactagagaatctgaattattttcatgtttttggaaacaggaagctattggagttaggttacaaacgaagttcaaagaaatgcaaagagaaattcgaaaacgttcagaaatattacaaacgtactaaagaaactcgcggtggtcgtcatgatggtaaagcttacaagttcttctctcagcttgaagctctcaacactactcctccttcatcttccctcgacgttactcctctctccgtcgctaatcccattctcatgccttcttcttcttcttctccatttcccgtattctctcaaccgcaaccgcaaacgcaaacgcaaccgcctcaaacgcataatgtctcttttactcctactccaccacctcttccgcttccttcaatgggtccgatatttaccggtgttactttctcgtctcatagctcatcgacggcttcaggaatggggtctgatgatgatgacgacgatatggacgttgatcaggctaacattgcgggttctagtagccgaaaacgcaaacgtggaaaccgcggtggaggcggtaaaatgatggaattgtttgaaggtttggtgagacaagtaatgcaaaagcaagcggctatgcaaaggagtttcttggaagctcttgagaagagagagcaagaacgtcttgatcgtgaagaagcttggaaacgtcaagaaatggctcggttagctcgagaacacgaggtcatgtctcaagaacgagccgcctctgcttctcgtgacgccgcaatcatttcattgattcagaaaattactggccataccattcagttacctccttctttgtcatctcaaccgcctccaccgtatcaaccgccacccgcggtcactaaacgtgtggcggaaccaccattatcaacagctcaatctcaatcacaacaaccaataatggcgattccacaacaacaaattcttcctcctcctcctccttctcatcctcacgctcatcaaccagaacagaaacaacaacaacaaccacaacaagagatggtcatgagctcggagcaatcatcattaccatcatcatcaagatggccaaaggcagagattctagcgcttataaacctgagaagtggaatggaaccaaggtaccaagataatgtacctaaaggacttctatgggaagagatctcaacttcaatgaagagaatgggatacaacagaaacgctaagagatgtaaagagaaatgggaaaacataaacaaatactacaagaaagttaaagaaagcaacaagaaacgtcctcaagatgctaagacttgtccttactttcaccgcctcgatcttctttaccgcaacaaagtactcggtagtggcggtggttctagcacttctggtctacctcaagaccaaaaacagagtccggtcactgcgatgaaaccgccacaagaaggacttgttaatgttcaacaaactcatgggtcagcttcaactgaggaagaagagcctatagaggaaagtccacaaggaacagaaaaggtacaaactttgcttttccttgtcaaaatgtgattggtttaatgttctttgataactgaaatatgatttgttggaattgaagccagaagaccttgtgatgagagagctgattcaacaacaacagcaactacaacaacaagaatcaatgataggtgagtatgaaaagattgaagagtctcacaattataataacatggaggaagaggaagatcaggaaatggatgaggaagaactagacgaggatgagaagtccgcggctttcgagattgcgtttcaaagccctgcaaacagaggaggcaatggccatacggaaccacctttcttgacaatggttcagtaaaatcagaatcattgtttcaagaaaatgtacttatgtgtgcatagttttctaaacaaaacacccaaaaacacaaaacacaaacacacacacacacacatctgacaccacaaactgaaatatcaaggtctcatcgatcttcgatttttcagtgaatacaattctttttcacattctttcccttttgtg

SEQ ID NO: 535 - DNA, 877 bp, Artificial Sequence
  Artificial sequence
  P1374
cggagctagagagaaagagagagtgtgtgtgtagaaaaagattgaaacatcatcaagattgatggagcaaggaggaggtggtggtggtaatgaagttgtggaggaagcttcacctattagttcaagacctcctgctaacaacttagaagagcttatgagattctcagccgccgcggatgacggtggattaggaggtggaggtggaggaggaggaggaggaagtgcttcttcttcatcgggaaatcgatggccgagagaagaaactttagctcttcttcggatccgatccgatatggattctacttttcgtgatgctactctcaaagctcctctttgggaacatgtttccaggaagctattggagttaggttacaaacgaagttcaaagaaatgcaaagagaaattcgaaaacgttcagaaatattacaaacgtactaaagaaactcgcggtggtcgtcatgatggtaaagcttacaagttcttctctcagcttgaagctctcaacactactcctcctcctcctccttctcatcctcacgctcatcaaccagaacagaaacaacaacaacaaccacaacaagagatggtcatgagctcggaacaatcatcattaccatcatcatcaagatggccaaaggcagagattctagcgcttataaacctgagaagtggaatggaaccaaggtaccaagataatgtacctaaaggacttctatgggaagagatctcaacttcaatgaagagaatgggatacaacagaaacgctaagagatgtaaagagaaatgggaaaacataaacaaatactacaagaaagttaaagaaagcaacaacagcaactacaacaacaagaatcaatgataggtgagtatgaaaaag

SEQ ID NO: 536 - DNA, 1652 bp, Artificial Sequence
  Artificial sequence
  P1717
cgtcgacctagagagaaagagagagtgtgtgtgtagaaaaagattgaaacatcatcaagattgatggagcaaggaggaggtggtggtggtaatgaagttgtggaggaagcttcacctattagttcaagacctcctgctaacaacttagaagagcttatgagattctcagccgccgcggatgacggtggattaggaggtggaggtggaggaggaggaggaggaagtgcttcttcttcatcgggaaatcgatggccgagagaagaaactttagctcttcttcggatccgatccgatatggattctacttttcgtgatgctactctcaaagctcctctttgggaacatgtttccaggaagctattggagttaggttacaaacgaagttcaaagaaatgcaaagagaaattcgaaaacgttcagaaatattacaaacgtactaaagaaactcgcggtggtcgtcatgatggtaaagcttacaagttcttctctcagcttgaagctctcaacactactcctccttcatcttccctcgacgttactcctctctccgtcgctaatcccattctcatgccttcttcttcttcttctccatttcccgtattctctcaaccgcaaccgcaaacgcaaacgcaaccgcctcaaacgcataatgtctcttttactcctactccaccgtatcaaccgccacccgcggtcactaaacgtgtggcggaaccaccattatcaacagctcaatctcaatcacaacaaccaataatggcgattccacaacaacaaattcttcctcctcctcctccttctcatcctcacgctcatcaaccagaacagaaacaacaacaacaaccacaacaagagatggtcatgagctcggaacaatcatcattaccatcatcatcaagatggccaaaggcagagattctagcgcttataaacctgagaagtggaatggaaccaaggtaccaagataatgtacctaaaggacttctatgggaagagatctcaacttcaatgaagagaatgggatacaacagaaacgctaagagatgtaaagagaaatgggaaaacataaacaaatactacaagaaagttaaagaaagcaacaagaaacgtcctcaagatgctaagacttgtccttactttcaccgcctcgatcttctttaccgcaacaaagtactcggtagtggcggtggttctagcacttctggtctacctcaagaccaaaaacagagtccggtcactgcgatgaaaccgccacaagaaggacttgttaatgttcaacaaactcatgggtcagcttcaactgaggaagaagagcctatagaggaaagtccacaaggaacagaaaagaagaccttgtgatgagagagctgattcaacaacaacagcaactacaacaacaagaatcaatgataggtgagtatgaaaagattgaagagtctcacaattataataacatggaggaagaggaagatcaggaaatggatgaggaagaactagacgaggatgagaagtccgcggctttcgagattgcgtttcaaagccctgcaaacagaggaggcaatggccatacggaaccacctttcttgacaatggttcagtaaaatcagaatcattgtttcaagaaaatgtacttatgtgtgcatagttttcgc

SEQ ID NO: 537 - DNA, 1445 bp, Artificial Sequence
  Artificial sequence
  P21299
tcgaccttcttgttccgaagaggtgagtagtcttgagtgggaagttgtgaacatgagtcaagaagaagaagatttggtctctcgaatgcataagcttgtcggtgacaggtgggagttgatcgccggaaggcgcggccgcggaagtgagtagcatcgaatgggagtttatcagtatgaccgaacaagaagaagatctcatctctcgaatgtacagacttgtcggaaataggtgggatttaatagcaggaagagtcgtaggaagaaaggcaaatgagatagagagatactggattatgagaaacgaattcggtagcccaattggtaaggaaataattattttcttttttccttttagtataaaatagttaagtgatgttaattagtatgattataataatatagttgttataattgtgaaaaaataatttataaatatattgtttacataaacaacatagtaatgtaaaaaaatatgacaagtgatgtgtaagacgaagaagataaaagttgagagtaagtatattatttttaatgaatttgatcgaacatgtaagatgatatactagcattaatatttgttttaatcataatagtaattctagctggtttgatgaattaaatatcaatgataaaatactatagtaaaaataagaataaataaattaaaataatatttttttatgattaatagtttattatataattaaatatctataccattactaaatattttagtttaaaagttaataaatattttgttagaaattccaatctgcttgtaatttatcaataaacaaaatattaaataacaagctaaagtaacaaataatatcaaactaatagaaacagtaatctaatgtaacaaaacataatctaatgctaatataacaaagcgcaagatctatcaattttatatagtattatttttcaatcaacattcttattaatttctaaataatacttgtagttttattaacttctaaatggattgactattaattaaatgaattagtcgaacatgaataaacaaggtaacatgatagatcatgtcattgtgttatcattgatcttacatttggattgattacagttgggaaattgggttcgaaatcgataatcttgcggccgctctagagaattcgtttctcataatccagtatctctctatctcatttgcctttcttcctacgactcttcctgctattaaatcccacctatttccgacaagtctgtacattcgagagatgagatcttcttcttgttcggtcatactgataaactcccattcgatgctactcacttccgcggccgcgccttccggcgatcaactcccacctgtcaccgacaagcttatgcattcgagagaccaaatcttcttcttcttgactcatgttcacaacttcccactcaagactactcacctcttcggaacaagaaggtcgacg

SEQ ID NO: 538 - DNA, 1147 bp, Artificial Sequence
  Artificial sequence
  P21204
taatacggtgccgtttgacatggataaccatcgcaggactaagcaacccaagaccaactccatcgttacttcttcttctgaagaagtgagtagtcttgagtgggaagttgtgaacatgagtcaagaagaagaagatttggtctctcgaatgcataagcttgtcggtgacaggtgggaactgatagctgggaggatcccaggaagaaccgctggagaaattgagaggttttgggtcatgaaaaatgcggccgctgaagctcgaaaaacaaagaaaaaaatcaaagggattcagcaagccactgcaggagtctcacaagacacttcggaaaatcctaacaaaacaatagttcctgcagcattaccacagctcacccctaccttggtgtcactgctggaggtgattgaacccgaggtgttgtatgcaggatatgatagctctgttccagattcagcatggagaattatgaccacactcaacatgttaggtgggcgtcaagtgattgcagcagtgaaatgggcaaaggcgataccaggcttcagaaacttacacctggatgaccaaatgaccctgctacagtactcatggatgtttctcatggcatttgccctgggttggagatcatacagacaatcaagtggaaacctgctctgctttgctcctgatctgattattaatgagcagagaatgtctctaccctgcatgtatgaccaatgtaaacacatgctgtttgtctcctctgaattacaaagattgcaggtatcctatgaagagtatctctgtatgaaaaccttactgcttctctcctcagttcctaaggaaggtctgaagagccaagagttatttgatgagattcgaatgacttatatcaaagagctaggaaaagccatcgtcaaaagggaagggaactccagtcagaactggcaacggttttaccaactgacaaagcttctggactccatgcatgaggtggttgagaatctccttacctactgcttccagacatttttggataagaccatgagtattgaattcccagagatgttagctgaaatcatcactaatcagataccaaaatattcaaatggaaatatcaaaaagcttctgtttcatcaaaaatctagacaggcctcgtaccggatcctctag

SEQ ID NO: 539 - DNA, 1344 bp, Artificial Sequence
  Artificial sequence
  P21279
taatacggtgccgtttgacatggataaccatcgcaggactaagcaacccaagaccaactccatcgttacttcttcttctgaagaagtgagtagtcttgagtgggaagttgtgaacatgagtcaagaagaagaagatttggtctctcgaatgcataagcttgtcggtgacaggtgggaactgatagctgggaggatcccaggaagaaccgctggagaaattgagaggttttgggtcatgaaaaatgcggccgctgaagctcgaaaaacaaagaaaaaaatcaaagggattcagcaagccactgcaggagtctcacaagacacttcggaaaatcctaacaaaacaatagttcctgcagcattaccacagctcacccctaccttggtgtcactgctggaggtgattgaacccgaggtgttgtatgcaggatatgatagctctgttccagattcagcatggagaattatgaccacactcaacatgttaggtgggcgtcaagtgattgcagcagtgaaatgggcaaaggcgataccaggcttcagaaacttacacctggatgaccaaatgaccctgctacagtactcatggatgtttctcatggcatttgccctgggttggagatcatacagacaatcaagtggaaacctgctctgctttgctcctgatctgattattaatgagcagagaatgtctctaccctgcatgtatgaccaatgtaaacacatgctgtttgtctcctctgaattacaaagattgcaggtatcctatgaagagtatctctgtatgaaaaccttactgcttctctcctcagttcctaaggaaggtctgaagagccaagagttatttgatgagattcgaatgacttatatcaaagagctaggaaaagccatcgtcaaaagggaagggaactccagtcagaactggcaacggttttaccaactgacaaagcttctggactccatgcatgaggtggttgagaatctccttacctactgcttccagacatttttggataagaccatgagtattgaattcccagagatgttagctgaaatcatcactaatcagataccaaaatattcaaatggaaatatcaaaaagcttctgtttcatcaaaaatctagttacccatacgatgttcctgactatgcgggctatccctatgacgtcccggactatgcaggatcctatccatatgacgttccagattacgcttctagatacccatacgatgttcctgactatgcgggctatccctatgacgtcccggactatgcaggatcctatccatatgacgttccagattacgctactagacaggcctcgtaccggatcctctagctaga

SEQ ID NO: 540 - DNA, 1147 bp, Artificial Sequence
  Artificial sequence
  P23483
aaatgaaccttgaagctcgaaaaacaaagaaaaaaatcaaagggattcagcaagccactgcaggagtctcacaagacacttcggaaaatcctaacaaaacaatagttcctgcagcattaccacagctcacccctaccttggtgtcactgctggaggtgattgaacccgaggtgttgtatgcaggatatgatagctctgttccagattcagcatggagaattatgaccacactcaacatgttaggtgggcgtcaagtgattgcagcagtgaaatgggcaaaggcgataccaggcttcagaaacttacacctggatgaccaaatgaccctgctacagtactcatggatgtttctcatggcatttgccctgggttggagatcatacagacaatcaagtggaaacctgctctgctttgctcctgatctgattattaatgagcagagaatgtctctaccctgcatgtatgaccaatgtaaacacatgctgtttgtctcctctgaattacaaagattgcaggtatcctatgaagagtatctctgtatgaaaaccttactgcttctctcctcagttcctaaggaaggtctgaagagccaagagttatttgatgagattcgaatgacttatatcaaagagctaggaaaagccatcgtcaaaagggaagggaactccagtcagaactggcaacggttttaccaactgacaaagcttctggactccatgcatgaggtggttgagaatctccttacctactgcttccagacatttttggataagaccatgagtattgaattcccagagatgttagctgaaatcatcactaatcagataccaaaatattcaaatggaaatatcaaaaagcttctgtttcatcaaaaaggtaccgtcgacatggataaccatcgcaggactaagcaacccaagaccaactccatcgttacttcttcttctgaagaagtgagtagtcttgagtgggaagttgtgaacatgagtcaagaagaagaagatttggtctctcgaatgcataagcttgtcggtgacaggtgggaactgatagctgggaggatcccaggaagaaccgctggagaaattgagaggttttgggtcatgaaaaattgaaaagtgatcaatatatctctatagtttcactg

SEQ ID NO: 541 - DNA, 1157 bp, Artificial Sequence
  Artificial sequence
  P21111
tcgacggaaccgctggagaaattgagaggttttgggtcatgaaaaattgaaaagtgatcaatatatctctatagtttcactgattgtttcgattatattccgttgtattttaaatttaccaactctgttataagaagaaaactttcttaaatcccaacgaattcggtagcccaattggtaaggaaataattattttcttttttccttttagtataaaatagttaagtgatgttaattagtatgattataataatatagttgttataattgtgaaaaaataatttataaatatattgtttacataaacaacatagtaatgtaaaaaaatatgacaagtgatgtgtaagacgaagaagataaaagttgagagtaagtatattatttttaatgaatttgatcgaacatgtaagatgatatactagcattaatatttgttttaatcataatagtaattctagctggtttgatgaattaaatatcaatgataaaatactatagtaaaaataagaataaataaattaaaataatatttttttatgattaatagtttattatataattaaatatctataccattactaaatattttagtttaaaagttaataaatattttgttagaaattccaatctgcttgtaatttatcaataaacaaaatattaaataacaagctaaagtaacaaataatatcaaactaatagaaacagtaatctaatgtaacaaaacataatctaatgctaatataacaaagcgcaagatctatcaattttatatagtattatttttcaatcaacattcttattaatttctaaataatacttgtagttttattaacttctaaatggattgactattaattaaatgaattagtcgaacatgaataaacaaggtaacatgatagatcatgtcattgtgttatcattgatcttacatttggattgattacagttgggaaattgggttcgaaatcgataagcttgcggccgctctagagaattcgttgggatttaagaaagttttcttcttataacagagttggtaaatttaaaatacaacggaatataatcgaaacaatcagtgaaactatagagatatattgatcacttttcaatttttcatgacccaaaacctctcaatttctccagcggttccgtcgacg

SEQ ID NO: 542 - DNA, 624 bp, Artificial Sequence
  Artificial sequence
  P23482
gatctatgcccaattttaatcaaagtgggaatattgctgatagctcattgtccttcactttcactaacagtagcaacggtccgaacctcataacaactcaaacaaattctcaagcgctttcacaaccaattgcctcctctaacgttcatgataacttcatgaataatgaaatcacggctagtaaaattgatgatggtaataattcaaaaccactgtcacctggttggacggaccaaactgcgtataacgcgtttggaatcactacagggatgtttaataccactacaatggatgatgtatataactatctattcgatgatgaagataccccaccaaacccaaaaaaagagggtaccgtcgacatggataaccatcgcaggactaagcaacccaagaccaactccatcgttacttcttcttctgaagaagtgagtagtcttgagtgggaagttgtgaacatgagtcaagaagaagaagatttggtctctcgaatgcataagcttgtcggtgacaggtgggaactgatagctgggaggatcccaggaagaaccgctggagaaattgagaggttttgggtcatgaaaaattgaaaagtgatcaatatatctctatagtttcactggc

SEQ ID NO: 543 - DNA, 969 bp, Artificial Sequence
  Artificial sequence
  P25290
atggataaccatcgcaggactaagcaacccaagaccaactccatcgttacttcttcttctgaagaagtgagtagtcttgagtgggaagttgtgaacatgagtcaagaagaagaagatttggtctctcgaatgcataagcttgtcggtgacaggtgggaactgatagctgggaggatcccaggaagaaccgctggagaaattgagaggttttgggtcatgaaaaattgcggccgcatggtgagcaagggcgaggagctgttcaccggggtggtgcccatcctggtcgagctggacggcgacgtaaacggccacaagttcagcgtgtccggcgagggcgagggcgatgccacctacggcaagctgaccctgaagttcatctgcaccaccggcaagctgcccgtgccctggcccaccctcgtgaccaccctgacctacggcgtgcagtgcttcagccgctaccccgaccacatgaagcagcacgacttcttcaagtccgccatgcccgaaggctacgtccaggagcgcaccatcttcttcaaggacgacggcaactacaagacccgcgccgaggtgaagttcgagggcgacaccctggtgaaccgcatcgagctgaagggcatcgacttcaaggaggacggcaacatcctggggcacaagctggagtacaactacaacagccacaacgtctatatcatggccgacaagcagaagaacggcatcaaggtgaacttcaagatccgccacaacatcgaggacggcagcgtgcagctcgccgaccactaccagcagaacacccccatcggcgacggccccgtgctgctgcccgacaaccactacctgagcacccagtccgccctgagcaaagaccccaacgagaagcgcgatcacatggtcctgctggagttcgtgaccgccgccgggatcactctcggcatggacgagctgtacaagtccggagggatcctctag

SEQ ID NO: 544 - DNA, 649 bp, Artificial Sequence
  Artificial sequence
  P108
tcgacccacgcgtccgctctctcagagtactctcttagtttctttcttcttcttctttgtaatacggtgccgtttgacatggataaccatcgcaggactaagcaacccaagaccaactccatcgttacttcttcttctgaaggtaagctgaaaacttaaacaccttcgttttctcatttttccatgtttttttatacttatctatatataatgagaaatctgaattttggtgatgacaaggaacagaagtgagtagtcttgagtgggaagttgtgaacatgagtcaagaagaagaagatttggtctctcgaatgcataagcttgtcggtgacaggtttgatcttttaactaataatgaatactatttcgtaggaaaataatttaattgtaacaccatagtaaaagctgaattttgtgtgttattatttgatgaaaggtgggaactgatagctgggaggatcccaggaagaaccgctggagaaattgagaggttttgggtcatgaaaaattgaaaagtgatcaatatatctctatagtttcactgattgtttcgattatattccgttgtattttaaatttaccaactctgttataagaagaaaactttcttaaatcccaaaccatttaactaaaaaaaaaaaaaaagggc

SEQ ID NO: 545 - DNA, 598 bp, Artificial Sequence
  Artificial sequence
  P21144
taatacggtgccgtttgacatggataaccatcgcaggactaagcaacccaagaccaactccatcgttacttcttcttctgaagaagtgagtagtcttgagtgggaagttgtgaacatgagtcaagaagaagaagatttggtctctcgaatgcataagcttgtcggtgacaggtgggaactgatagctgggaggatcccaggaagaaccgctggagaaattgagaggttttgggtcatgaaaaatgaattccccaattttaatcaaagtgggaatattgctgatagctcattgtccttcactttcactaacagtagcaacggtccgaacctcataacaactcaaacaaattctcaagcgctttcacaaccaattgcctcctctaacgttcatgataacttcatgaataatgaaatcacggctagtaaaattgatgatggtaataattcaaaaccactgtcacctggttggacggaccaaactgcgtataacgcgtttggaatcactacagggatgtttaataccactacaatggatgatgtatataactatctattcgatgatgaagataccccaccaaacccaaaaaaagagtagtaa

SEQ ID NO: 546 - DNA, 649 bp, Artificial Sequence; identical to SEQ ID NO: 544
  Artificial sequence
  P23328

SEQ ID NO: 547 - DNA, 649 bp, Artificial Sequence; identical to SEQ ID NO: 544
  Artificial sequence
  P5099

SEQ ID NO: 548 - DNA, 267 bp, Artificial Sequence
  Artificial sequence
  P23516
tcgacatggataaccatcgcaggactaagcaacccaagaccaactccatcgttacttcttcttctgaagaagtgagtagtcttgagtgggaagttgtgaacatgagtcaagaagaagaagatttggtctctcgaatgcataagcttgtcggtgacaggtgggaactgatagctgggaggatcccaggaagaaccgctggagaaattgagaggttttgggtcatgaaaaattgaaaagtgatcaatatatctctatagtttcactggc

SEQ ID NO: 549 - DNA, 512 bp, Artificial Sequence
  Artificial sequence
  P23517
tcgacccacgcgtccgctctctcagagtactctcttagtttctttcttcttcttctttgtaatacggtgccgtttgacatggataaccatcgcaggactaagcaacccaagaccaactccatcgttacttcttcttctgaaggtaagctgaaaacttaaacaccttcgttttctcatttttccatgtttttttatacttatctatatataatgagaaatctgaattttggtgatgacaaggaacagaagtgagtagtcttgagtgggaagttgtgaacatgagtcaagaagaagaagatttggtctctcgaatgcataagcttgtcggtgacaggtttgatcttttaactaataatgaatactatttcgtaggaaaataatttaattgtaacaccatagtaaaagctgaattttgtgtgttattatttgatgaaaggtgggaactgatagctgggaggatcccaggaagaaccgctggagaaattgagaggttttgggtcatgaaaaattga

SEQ ID NO: 550 - DNA, 810 bp, Artificial Sequence
  Artificial sequence
  P25656
atggataaccatcgcaggactaagcaacccaagaccaactccatcgttacttcttcttctgaaggaacagaagtgagtagtcttgagtgggaagttgtgaacatgagtcaagaagaagaagatttggtctctcgaatgcataagcttgtcggtgacaggtgggaactgatagctgggaggatcccaggaagaaccgctggagaaattgagaggttttgggtcatgaaaaatgcggccgctgccgctgcggcagcggccatggaaaagagaagatggaaaaagaatttcatagccgtctcagcagccaaccgctttaagaaaatctcatcctccggggcacttgattatgatattccaactactgctagcgagaatttgtattttcagggtgagctcaaaaccgcggctcttgcgcaacacgatgaagccgtggacaacaaattcaacaaagaacaacaaaacgcgttctatgagatcttacatttacctaacttaaacgaagaacaacgaaacgccttcatccaaagtttaaaagatgacccaagccaaagcgctaaccttttagcagaagctaaaaagctaaatgatgctcaggcgccgaaagtagacaacaaattcaacaaagaacaacaaaacgcgttctatgagatcttacatttacctaacttaaacgaagaacaacgaaacgccttcatccaaagtttaaaagatgacccaagccaaagcgctaaccttttagcagaagctaaaaagctaaatggtgctcaggcgccgaaagtagacgcgaattccgcggggaagtcaacctga

SEQ ID NO: 551 - DNA, 672 bp, Artificial Sequence
  Artificial sequence
  P25457
atggataaccatcgcaggactaagcaacccaagaccaactccatcgttacttcttcttctgaaggaacagaagtgagtagtcttgagtgggaagttgtgaacatgagtcaagaagaagaagatttggtctctcgaatgcataagcttgtcggtgacaggtgggaactgatagctgggaggatcccaggaagaaccgctggagaaattgagaggttttgggtcatgaaaaatgcggccgcggctgccgccgcagccgctgctagttacccatacgatgttcctgactatgcgggctatccctatgacgtcccggactatgcaggatcctatccatatgacgttccggattacgcttctagatacccatacgatgttcctgactatgcgggctatccctatgacgtcccggactatgcaggatcctatccatatgacgttccagattacgctactagttacccatacgatgttcctgactatgcgggctatccctatgacgtcccggactatgcaggatcctatccatatgacgttccagattacgcttctagatacccatacgatgttcctgactatgcgggctatccctatgacgtcccggactatgcaggatcctatccatatgacgttccagattacgctactagacaggcctcgtaccagatcctctag

SEQ ID NO: 552 - DNA, 728 bp, Artificial Sequence
  Artificial sequence
  P26264
atgagttacccatacgatgttcctgactatgcgggctatccctatgacgtcccggactatgcaggatcctatccatatgacgttccagattacgcttctagatacccatacgatgttcctgactatgcgggctatccctatgacgtcccggactatgcaggatcctatccatatgacgttccagattacgctactagttacccatacgatgttcctgactatgcgggctatccctatgacgtcccggactatgcaggatcctatccatatgacgttccagattacgcttctagatacccatacgatgttcctgactatgcgggctatccctatgacgtcccggactatgcaggatcctatccatatgacgttccagattacgctactagacaggcctcgtaccggatcctctacctagagaattccgccgctgccgctgcggcagcggctgcagcgggtaccgtcgacatggataaccatcgcaggactaagcaacccaagaccaactccatcgttacttcttcttctgaagaagtgagtagtcttgagtgggaagttgtgaacatgagtcaagaagaagaagatttggtctctcgaatgcataagcttgtcggtgacaggtgggaactgatagctgggaggatcccaggaagaaccgctggagaaattgagaggttttgggtcatgaaaaattgaaaagtgatcaatatatctctatagtttcactg

SEQ ID NO: 553 - DNA, 1923 bp, Artificial Sequence
  Artificial sequence
  P21166
ttattaagtgctatgcgttaatcggcatctataaagtgttgcattgatgaacaaagtggatgcctaaactagacgtttaactaaatgtttagaatgaaatcttcatctcatctaaaaagtgttgcattgatgtaaaaagtggatgcccattagttcttggctttgaaatgtttttagaatgaaatcttcatcaatctccatatgtggttcaatccactcattttatcttttgttaaagatgttcttcaggccaatataatgatgaccatggatggtttgcaactcgcatataacacttctttatccgatggttacaagtattacatggctatagatagcttttgcatgcaacaaattatctatcaaagtttatgcatcctctaaaatatggtcattggcaagccactaaacgtatatattgtgacaatgtatgatgatatatttttatgtgttgactccgtttttcattaagtaatgaaacatgttgctctagattaccattttaatcgcaaacatatatgttgctctaccacgcattgcatcaaatgataagcttgaggacgcttcgacaaaaacatatttctccttcttcttactgaaccaaatgacaattgacaaaccccattaataaaatcggttagtgttaatgtgtcactcataatattaacttagtaaagaacaagaccacattaattaaatcaggtgttagtctgagaatatacgtttctcttcctcattccaaacttaaattcggaatttactgagaatatattgttagcactgaaaaaggttaagttgaaagtttgctagggatggcaattaaatatagtcttgccttggggatattcccttcgtggacttgtaagtttatttataggtcctcttatgtatatatagatgatctaacgatcgatatactatgaaaaaagttgttactagattttattgcaggtaatagtgttgaataacccgaaccaataaagcagttgtaacgaacacacgacacgttgcttactgcgaggaccactttgttttttgttttttttggctttaagccaatttaggaccaaatttgcatgattgaggatgcaagtatccaacccattttcatctttcgtagtgacactcatttacttttgtgatggacacgttatagtatatcttaaatattaaagagacatgattgggggatcattgttttaatttaaataatgtagattctattcttttcatggtattaatccaatttatagaaagttatgtgttattagcaattaagctaaatgatgaaaacaatcagtttagtgaaacaaactcgccgagaaaacatgaatggttgaaaatattattgtgttttacaaacgtacacgaggacaatagttttgtaagtttttcttaggcattgaaaaatgtttgatacaaaaagtaatgttaaaataattaaaaatgattttgtcttaatatatccaaaatttcaatctattatgaacaaagggagtataatttctgattgaatgaactggaatagcaatcagaaaagctttgaaaacaattgttgttgattattaatgatcttaattaacggcatgtatcaatatttatacaacttatgttccagtccaagccatcacaacggagtaaatgaagtcacgggtacttgtggtttttattggttgcaaacttgcaacttgcaaagatagctaacaataattaatataattaatgagaacaaaaccaatttagtaaattaaaatcctttaacatagaaaccgaccaaacccgttggaccgttggttacttgatttggttagttgctataaatagaaatgatggttcgtgtgcaaccttcaaaatacgaccactctctcagagtactctcttagtttctttcttcttcttctttgtaatacggtgccgtttgac

SEQ ID NO: 554 - DNA, 1923 bp, Artificial Sequence; identical to SEQ ID NO: 553
  Artificial sequence
  P25611

SEQ ID NO: 555 - DNA, 1921 bp, Artificial Sequence
  Artificial sequence
  P25141
ttattaagtgctatgcgttaatcggcatctataaagtgttgcattgatgaacaaagtggatgcctaaactagacgtttaactaaatgtttagaatgaaatcttcatctcatctaaaaagtgttgcattgatgtaaaaagtggatgcccattagttcttggctttgaaatgtttttagaatgaaatcttcatcaatctccatatgtggttcaatccactcattttatcttttgttaaagatgttcttcaggccaatataatgatgaccatggatggtttgcaactcgcatataacacttctttatccgatggttacaagtattacatggctatagatagcttttgcatgcaacaaattatctatcaaagtttatgcatcctctaaaatatggtcattggcaagccactaaacgtatatattgtgacaatgtatgatgatatatttttatgtgttgactccgtttttcattaagtaatgaaacatgttgctctagattaccattttaatcgcaaacatatatgttgctctaccacgcattgcatcaaatgataagcttgaggacgcttcgacaaaaacatatttctccttcttcttactgaaccaaatgacaattgacaaaccccattaataaaatcggttagtgttaatgtgtcactcataatattaacttagtaaagaacaagaccacattaattaaatcaggtgttagtctgagaatatacgtttctcttcctcattccaaacttaaattcggaatttactgagaatatattgttagcactgaaaaaggttaagttgaaagtttgctagggatggcaattaaatatagtcttgccttggggatattcccttcgtggacttgtaagtttatttataggtcctcttatgtatatatagatgatctaacgatcgatatactatgaaaaaagttgttactagattttattgcaggtaatagtgttgaataacccgaaccaataaagcagttgtaacgaacacacgacacgttgcttactgcgaggaccactttgttttttgttttttttggctttaagccaatttaggaccaaatttgcatgattgaggatgcaagtatccaacccattttcatctttcgtagtgacactcatttacttttgtgatggacacgttatagtatatcttaaatattaaagagacatgattgggggatcattgttttaatttaaataatgtagattctattcttttcatggtattaatccaatttatagaaagttatgtgttattagcaattaagctaaatgatgaaaacaatcagtttagtgaaacaaactcgccgagaaaacatgaatggttgaaaatattattgtgttttacaaacgtacacgaggacaatagttttgtaagtttttcttaggcattgaaaaatgtttgatacaaaaagtaatgttaaaataattaaaaatgattttgtcttaatatatccaaaatttcaatctattatgaacaaagggagtataatttctgattgaatgaactggaatagcaatcagaaaagctttgaaaacaattgttgttgattattaatgatcttaattaacggcatgtatcaatatttatacaacttatgttccagtccaagccatcacaacggagtaaatgaagtcacgggtacttgtggtttttattggttgcaaacttgcaacttgcaaagatagctaacaataattaatataattaatgagaacaaaaccaatttagtaaattaaaatcctttaacatagaaaccgaccaaacccgttggaccgttggttacttgatttggttagttgctataaatagaaatgatggttcgtgtgcaaccttcaaaatacgaccactctctcagagtactctcttagtttctttcttcttcttctttgtaatacggtgccgtttg

SEQ ID NO: 556 - DNA, 762 bp, Artificial Sequence
  Artificial sequence
  P21525
tcgacccacgcgtccgctctctcagagtactctcttagtttctttcttcttcttctttgtaatacggtgccgtttgacatggataaccatcgcaggactaagcaacccaagaccaactccatcgttacttcttcttctgaaggtaagctgaaaacttaaacaccttcgttttctcatttttccatgtttttttatacttatctatatataatgagaaatctgaattttggtgatgacaaggaacagaagtgagtagtcttgagtgggaagttgtgaacatgagtcaagaagaagaagatttggtctctcgaatgcataagcttgtcggtgacaggtttgatcttttaactaataatgaatactatttcgtaggaaaataatttaattgtaacaccatagtaaaagctgaattttgtgtgttattatttgatgaaaggtgggaactgatagctgggaggatcccaggaagaaccgctggagaaattgagaggttttgggtcatgaaaaattgaaaagtgatcaatatatctctatagtttcactgattgtttcgattatattccgttgtattttaaatttaccaactctgttataagaagaaaactttcttaaatcccaaaccatttaactctcaagaaccatttattgtgtgggctacgaatatttgggccttccaagcctaaatttatttttttgccatcctagtaatttctagaagctaagtcgtagatgttgtacgtggatatttcattaatttctgct

SEQ ID NO: 557 - DNA, 1938 bp, Artificial Sequence
  Artificial sequence
  P21207
taaatggaatcgagtagcgttgatgagagtactacaagtacaggttccatctgtgaaaccccggcgataactccggcgaaaaagtcgtcggtaggtaacttatacaggatgggaagcggatcaagcgttgtgttagattcagagaacggcgtagaagctgaatctaggaagcttccgtcgtcaaaatacaaaggtgtggtgccacaaccaaacggaagatggggagctcagatttacgagaaacaccagcgcgtgtggctcgggacattcaacgaagaagacgaagccgctcgtgcctacgacgtcgcggttcacaggttccgtcgccgtgacgccgtcacaaatttcaaagacgtgaagatggacgaagacgaggtcgatttcttgaattctcattcgaaatctgagatcgttgatatgttgaggaaacatacttataacgaagagttagagcagagtaaacggcgtcgtaatggtaacggaaacatgactaggacgttgttaacgtcggggttgagtaatgatggtgtttctacgacggggtttagatcggcggaggcactgtttgagaaagcggtaacgccaagcgacgttgggaagctaaaccgtttggttataccgaaacatcacgcagagaaacattttccgttaccgtcaagtaacgtttccgtgaaaggagtgttgttgaactttgaggacgttaacgggaaagtgtggaggttccgttactcgtattggaacagtagtcagagttatgttttgactaaaggttggagcaggttcgttaaggagaagaatctacgtgctggtgacgtggttagtttcagtagatctaacggtcaggatcaacagttgtacattgggtggaagtcgagatccgggtcagatttagatgcgggtcgggttttgagattgttcggagttaacatttcaccggagagttcaagaaacgacgtcgtaggaaacaaaagagtgaacgatactgagatgttatcgttggtgtgtagcaagaagcaacgcatctttcacgcctcggcggccgctgaagctcgaaaaacaaagaaaaaaatcaaagggattcagcaagccactgcaggagtctcacaagacacttcggaaaatcctaacaaaacaatagttcctgcagcattaccacagctcacccctaccttggtgtcactgctggaggtgattgaacccgaggtgttgtatgcaggatatgatagctctgttccagattcagcatggagaattatgaccacactcaacatgttaggtgggcgtcaagtgattgcagcagtgaaatgggcaaaggcgataccaggcttcagaaacttacacctggatgaccaaatgaccctgctacagtactcatggatgtttctcatggcatttgccctgggttggagatcatacagacaatcaagtggaaacctgctctgctttgctcctgatctgattattaatgagcagagaatgtctctaccctgcatgtatgaccaatgtaaacacatgctgtttgtctcctctgaattacaaagattgcaggtatcctatgaagagtatctctgtatgaaaaccttactgcttctctcctcagttcctaaggaaggtctgaagagccaagagttatttgatgagattcgaatgacttatatcaaagagctaggaaaagccatcgtcaaaagggaagggaactccagtcagaactggcaacggttttaccaactgacaaagcttctggactccatgcatgaggtggttgagaatctccttacctactgcttccagacatttttggataagaccatgagtattgaattcccagagatgttagctgaaatcatcactaatcagataccaaaatattcaaatggaaatatcaaaaagcttctgtttcatcaaaaatctagacaggcctcgtaccggatcctctag

SEQ ID NO: 558 - DNA, 2135 bp, Artificial Sequence
  Artificial sequence
  P21282
taaatggaatcgagtagcgttgatgagagtactacaagtacaggttccatctgtgaaaccccggcgataactccggcgaaaaagtcgtcggtaggtaacttatacaggatgggaagcggatcaagcgttgtgttagattcagagaacggcgtagaagctgaatctaggaagcttccgtcgtcaaaatacaaaggtgtggtgccacaaccaaacggaagatggggagctcagatttacgagaaacaccagcgcgtgtggctcgggacattcaacgaagaagacgaagccgctcgtgcctacgacgtcgcggttcacaggttccgtcgccgtgacgccgtcacaaatttcaaagacgtgaagatggacgaagacgaggtcgatttcttgaattctcattcgaaatctgagatcgttgatatgttgaggaaacatacttataacgaagagttagagcagagtaaacggcgtcgtaatggtaacggaaacatgactaggacgttgttaacgtcggggttgagtaatgatggtgtttctacgacggggtttagatcggcggaggcactgtttgagaaagcggtaacgccaagcgacgttgggaagctaaaccgtttggttataccgaaacatcacgcagagaaacattttccgttaccgtcaagtaacgtttccgtgaaaggagtgttgttgaactttgaggacgttaacgggaaagtgtggaggttccgttactcgtattggaacagtagtcagagttatgttttgactaaaggttggagcaggttcgttaaggagaagaatctacgtgctggtgacgtggttagtttcagtagatctaacggtcaggatcaacagttgtacattgggtggaagtcgagatccgggtcagatttagatgcgggtcgggttttgagattgttcggagttaacatttcaccggagagttcaagaaacgacgtcgtaggaaacaaaagagtgaacgatactgagatgttatcgttggtgtgtagcaagaagcaacgcatctttcacgcctcggcggccgctgaagctcgaaaaacaaagaaaaaaatcaaagggattcagcaagccactgcaggagtctcacaagacacttcggaaaatcctaacaaaacaatagttcctgcagcattaccacagctcacccctaccttggtgtcactgctggaggtgattgaacccgaggtgttgtatgcaggatatgatagctctgttccagattcagcatggagaattatgaccacactcaacatgttaggtgggcgtcaagtgattgcagcagtgaaatgggcaaaggcgataccaggcttcagaaacttacacctggatgaccaaatgaccctgctacagtactcatggatgtttctcatggcatttgccctgggttggagatcatacagacaatcaagtggaaacctgctctgctttgctcctgatctgattattaatgagcagagaatgtctctaccctgcatgtatgaccaatgtaaacacatgctgtttgtctcctctgaattacaaagattgcaggtatcctatgaagagtatctctgtatgaaaaccttactgcttctctcctcagttcctaaggaaggtctgaagagccaagagttatttgatgagattcgaatgacttatatcaaagagctaggaaaagccatcgtcaaaagggaagggaactccagtcagaactggcaacggttttaccaactgacaaagcttctggactccatgcatgaggtggttgagaatctccttacctactgcttccagacatttttggataagaccatgagtattgaattcccagagatgttagctgaaatcatcactaatcagataccaaaatattcaaatggaaatatcaaaaagcttctgtttcatcaaaaatctagttacccatacgatgttcctgactatgcgggctatccctatgacgtcccggactatgcaggatcctatccatatgacgttccagattacgcttctagatacccatacgatgttcctgactatgcgggctatccctatgacgtcccggactatgcaggatcctatccatatgacgttccagattacgctactagacaggcctcgtaccggatcctctagctaga

SEQ ID NO: 559 - DNA, 2056 bp, Artificial Sequence
  Artificial sequence
  P21213
aaatgaaccttgaagctcgaaaaacaaagaaaaaaatcaaagggattcagcaagccactgcaggagtctcacaagacacttcggaaaatcctaacaaaacaatagttcctgcagcattaccacagctcacccctaccttggtgtcactgctggaggtgattgaacccgaggtgttgtatgcaggatatgatagctctgttccagattcagcatggagaattatgaccacactcaacatgttaggtgggcgtcaagtgattgcagcagtgaaatgggcaaaggcgataccaggcttcagaaacttacacctggatgaccaaatgaccctgctacagtactcatggatgtttctcatggcatttgccctgggttggagatcatacagacaatcaagtggaaacctgctctgctttgctcctgatctgattattaatgagcagagaatgtctctaccctgcatgtatgaccaatgtaaacacatgctgtttgtctcctctgaattacaaagattgcaggtatcctatgaagagtatctctgtatgaaaaccttactgcttctctcctcagttcctaaggaaggtctgaagagccaagagttatttgatgagattcgaatgacttatatcaaagagctaggaaaagccatcgtcaaaagggaagggaactccagtcagaactggcaacggttttaccaactgacaaagcttctggactccatgcatgaggtggttgagaatctccttacctactgcttccagacatttttggataagaccatgagtattgaattcccagagatgttagctgaaatcatcactaatcagataccaaaatattcaaatggaaatatcaaaaagcttctgtttcatcaaaaaggtaccgtcgacgaatcgagtagcgttgatgagagtactacaagtacaggttccatctgtgaaaccccggcgataactccggcgaaaaagtcgtcggtaggtaacttatacaggatgggaagcggatcaagcgttgtgttagattcagagaacggcgtagaagctgaatctaggaagcttccgtcgtcaaaatacaaaggtgtggtgccacaaccaaacggaagatggggagctcagatttacgagaaacaccagcgcgtgtggctcgggacattcaacgaagaagacgaagccgctcgtgcctacgacgtcgcggttcacaggttccgtcgccgtgacgccgtcacaaatttcaaagacgtgaagatggacgaagacgaggtcgatttcttgaattctcattcgaaatctgagatcgttgatatgttgaggaaacatacttataacgaagagttagagcagagtaaacggcgtcgtaatggtaacggaaacatgactaggacgttgttaacgtcggggttgagtaatgatggtgtttctacgacggggtttagatcggcggaggcactgtttgagaaagcggtaacgccaagcgacgttgggaagctaaaccgtttggttataccgaaacatcacgcagagaaacattttccgttaccgtcaagtaacgtttccgtgaaaggagtgttgttgaactttgaggacgttaacgggaaagtgtggaggttccgttactcgtattggaacagtagtcagagttatgttttgactaaaggttggagcaggttcgttaaggagaagaatctacgtgctggtgacgtggttagtttcagtagatctaacggtcaggatcaacagttgtacattgggtggaagtcgagatccgggtcagatttagatgcgggtcgggttttgagattgttcggagttaacatttcaccggagagttcaagaaacgacgtcgtaggaaacaaaagagtgaacgatactgagatgttatcgttggtgtgtagcaagaagcaacgcatctttcacgcctcgtaacaactcttcttctttttttttcttttgttgttttaataatttttaaaaactccattttcgttttctttatttgcatcggtttctttcttcttgtttaccaaaggttcatgagttgtttttgttgtattgatgaactg

SEQ ID NO: 560 - DNA, 2337 bp, Artificial Sequence
  Artificial sequence
  P21288
atgaaccttgaagctcgaaaaacaaagaaaaaaatcaaagggattcagcaagccactgcaggagtctcacaagacacttcggaaaatcctaacaaaacaatagttcctgcagcattaccacagctcacccctaccttggtgtcactgctggaggtgattgaacccgaggtgttgtatgcaggatatgatagctctgttccagattcagcatggagaattatgaccacactcaacatgttaggtgggcgtcaagtgattgcagcagtgaaatgggcaaaggcgataccaggcttcagaaacttacacctggatgaccaaatgaccctgctacagtactcatggatgtttctcatggcatttgccctgggttggagatcatacagacaatcaagtggaaacctgctctgctttgctcctgatctgattattaatgagcagagaatgtctctaccctgcatgtatgaccaatgtaaacacatgctgtttgtctcctctgaattacaaagattgcaggtatcctatgaagagtatctctgtatgaaaaccttactgcttctctcctcagttcctaaggaaggtctgaagagccaagagttatttgatgagattcgaatgacttatatcaaagagctaggaaaagccatcgtcaaaagggaagggaactccagtcagaactggcaacggttttaccaactgacaaagcttctggactccatgcatgaggtggttgagaatctccttacctactgcttccagacatttttggataagaccatgagtattgaattcccagagatgttagctgaaatcatcactaatcagataccaaaatattcaaatggaaatatcaaaaagcttctgtttcatcaaaaaggtaccgtcgacgaatcgagtagcgttgatgagagtactacaagtacaggttccatctgtgaaaccccggcgataactccggcgaaaaagtcgtcggtaggtaacttatacaggatgggaagcggatcaagcgttgtgttagattcagagaacggcgtagaagctgaatctaggaagcttccgtcgtcaaaatacaaaggtgtggtgccacaaccaaacggaagatggggagctcagatttacgagaaacaccagcgcgtgtggctcgggacattcaacgaagaagacgaagccgctcgtgcctacgacgtcgcggttcacaggttccgtcgccgtgacgccgtcacaaatttcaaagacgtgaagatggacgaagacgaggtcgatttcttgaattctcattcgaaatctgagatcgttgatatgttgaggaaacatacttataacgaagagttagagcagagtaaacggcgtcgtaatggtaacggaaacatgactaggacgttgttaacgtcggggttgagtaatgatggtgtttctacgacggggtttagatcggcggaggcactgtttgagaaagcggtaacgccaagcgacgttgggaagctaaaccgtttggttataccgaaacatcacgcagagaaacattttccgttaccgtcaagtaacgtttccgtgaaaggagtgttgttgaactttgaggacgttaacgggaaagtgtggaggttccgttactcgtattggaacagtagtcagagttatgttttgactaaaggttggagcaggttcgttaaggagaagaatctacgtgctggtgacgtggttagtttcagtagatctaacggtcaggatcaacagttgtacattgggtggaagtcgagatccgggtcagatttagatgcgggtcgggttttgagattgttcggagttaacatttcaccggagagttcaagaaacgacgtcgtaggaaacaaaagagtgaacgatactgagatgttatcgttggtgtgtagcaagaagcaacgcatctttcacgcctcgtgcggccgctctagttacccatacgatgttcctgactatgcgggctatccctatgacgtcccggactatgcaggatcctatccatatgacgttccagattacgcttctagatacccatacgatgttcctgactatgcgggctatccctatgacgtcccggactatgcaggatcctatccatatgacgttccagattacgctactagttacccatacgatgttcctgactatgcgggctatccctatgacgtcccggactatgcaggatcctatccatatgacgttccagattacgcttctagatacccatacgatgttcctgactatgcgggctatccctatgacgtcccggactatgcaggatcctatccatatgacgttccagattacgctactagacaggcctcgtaccggatcctctag

SEQ ID NO: 561 - DNA, 1514 bp, Artificial Sequence
  Artificial sequence
  P21297
tcgaccgagatccgggtcagatttagatgcgggtcgggttttgagattgttcggagttaacatttcaccggagagttcaagaaacgacgtcgtaggaaacaaaagagtgaacgatactgagatgttatcgttggtgtgtagcaagaagcaacgcatctttcacgcctcgtaacaactcttcttcttttttttttcttttgttgttttaataatttttaaaaactccattttcgttttctttatttgcatcggtttctttcttcttgtttaccaaaggttcatgagttgtttttgttgtattgatgaactgtaaattttatttataggataaattttgaattcggtagcccaattggtaaggaaataattattttcttttttccttttagtataaaatagttaagtgatgttaattagtatgattataataatatagttgttataattgtgaaaaaataatttataaatatattgtttacataaacaacatagtaatgtaaaaaaatatgacaagtgatgtgtaagacgaagaagataaaagttgagagtaagtatattatttttaatgaatttgatcgaacatgtaagatgatatactagcattaatatttgttttaatcataatagtaattctagctggtttgatgaattaaatatcaatgataaaatactatagtaaaaataagaataaataaattaaaataatatttttttatgattaatagtttattatataattaaatatctataccattactaaatattttagtttaaaagttaataaatattttgttagaaattccaatctgcttgtaatttatcaataaacaaaatattaaataacaagctaaagtaacaaataatatcaaactaatagaaacagtaatctaatgtaacaaaacataatctaatgctaatataacaaagcgcaagattctatcaattttatatagtattatttttcaatcaacattcttattaatttctaaataatacttgtagttttattaacttctaaatggattgactattaattaaatgaattagtcgaacatgaataaacaaggtaacatgatagatcatgtcattgtgttatcattgatcttacatttggattgattacagttgggaaattgggttcgaaatcgataatcttgcggccgctctagagaattcaaaatttatcctataaataaaatttacagttcatcaatacaacaaaaacaactcatgaacctttggtaaacaagaagaaagaaaccgatgcaaataaagaaaacgaaaatggagtttttaaaaattattaaaacaacaaaagaaaaaaaaaagaagaagagttgttacgaggcgtgaaagatgcgttgcttcttgctacacaccaacgataacatctcagtatcgttcactcttttgtttcctacgacgtcgtttcttgaactctccggtgaaatgttaactccgaacaatctcaaaacccgacccgcatctaaatctgacccggatctcggtcgacg

SEQ ID NO: 562 - DNA, 1311 bp, Artificial Sequence
  Artificial sequence
  P21162
gaagccgaatcaagaaagcttccgtcgtcaaaatacaaaggtgtggtgccacaaccaaacggaagatggggagctcagatttacgagaaacaccagcgcgtgtggctcgggacattcaacgaagaagacgaagccgctcgtgcctacgacgtcgcggttcacaggttccgtcgccgtgacgccgtcacaaatttcaaagacgtgaagatggacgaagacgaggtcgatttcttgaattcggtagcccaattggtaaggaaataattattttcttttttccttttagtataaaatagttaagtgatgttaattagtatgattataataatatagttgttataattgtgaaaaaataatttataaatatattgtttacataaacaacatagtaatgtaaaaaaatatgacaagtgatgtgtaagacgaagaagataaaagttgagagtaagtatattatttttaatgaatttgatcgaacatgtaagatgatatactagcattaatatttgttttaatcataatagtaattctagctggtttgatgaattaaatatcaatgataaaatactatagtaaaaataagaataaataaattaaaataatatttttttatgattaatagtttattatataattaaatatctataccattactaaatattttagtttaaaagttaataaatattttgttagaaattccaatctgcttgtaatttatcaataaacaaaatattaaataacaagctaaagtaacaaataatatcaaactaatagaaacagtaatctaatgtaacaaaacataatctaatgctaatataacaaagcgcaagatctatcaattttatatagtattatttttcaatcaacattcttattaatttctaaataatacttgtagttttattaacttctaaatggattgactattaattaaatgaattagtcgaacatgaataaacaaggtaacatgatagatcatgtcattgtgttatcattgatcttacatttggattgattacagttgggaaattgggttcgaaatcgataatcttgcggccgctctagagaattcaagaaatcgacctcgtcttcgtccatcttcacgtctttgaaatttgtgacggcgtcacggcgacggaacctgtgaaccgcgacgtcgtaggcacgagcggcttcgtcttcttcgttgaatgtcccgagccacacgcgctggtgtttctcgtaaatctgagctccccatcttccgtttggttgtggcaccacacctttgtattttgacgacggaagctttcttgattcggcttcgtcgac

SEQ ID NO: 563 - DNA, 1317 bp, Artificial Sequence
  Artificial sequence
  P21303
tcgacgaagccgaatcaagaaagcttccgtcgtcaaaatacaaaggtgtggtgccacaaccaaacggaagatggggagctcagatttacgagaaacaccagcgcgtgtggctcgggacattcaacgaagaagacgaagccgctcgtgcctacgacgtcgcggttcacaggttccgtcgccgtgacgccgtcacaaatttcaaagacgtgaagatggacgaagacgaggtcgatttcttgaattcggtagcccaattggtaaggaaataattattttcttttttccttttagtataaaatagttaagtgatgttaattagtatgattataataatatagttgttataattgtgaaaaaataatttataaatatattgtttacataaacaacatagtaatgtaaaaaaatatgacaagtgatgtgtaagacgaagaagataaaagttgagagtaagtatattatttttaatgaatttgatcgaacatgtaagatgatatactagcattaatatttgttttaatcataatagtaattctagctggtttgatgaattaaatatcaatgataaaatactatagtaaaaataagaataaataaattaaaataatatttttttatgattaatagtttattatataattaaatatctataccattactaaatattttagtttaaaagttaataaatattttgttagaaattccaatctgcttgtaatttatcaataaacaaaatattaaataacaagctaaagtaacaaataatatcaaactaatagaaacagtaatctaatgtaacaaaacataatctaatgctaatataacaaagcgcaagatctatcaattttatatagtattatttttcaatcaacattcttattaatttctaaataatacttgtagttttattaacttctaaatggattgactattaattaaatgaattagtcgaacatgaataaacaaggtaacatgatagatcatgtcattgtgttatcattgatcttacatttggattgattacagttgggaaattgggttcgaaatcgataatcttgcggccgctctagagaattcaagaaatcgacctcgtcttcgtccatcttcacgtctttgaaatttgtgacggcgtcacggcgacggaacctgtgaaccgcgacgtcgtaggcacgagcggcttcgtcttcttcgttgaatgtcccgagccacacgcgctggtgtttctcgtaaatctgagctccccatcttccgtttggttgtggcaccacacctttgtattttgacgacggaagctttcttgattcggcttcgtcgacg

SEQ ID NO: 564 - DNA, 1107 bp, Artificial Sequence
  Artificial sequence
  P21304
tcgacgaaagcttccgtcgtcaaaatacaaaggtgtggtgccacaaccaaacggaagatggggagctcagatttacgagaaacaccagcgcgtgtggctcgggacattcaacgaggaagaagaagcccgctcggaattcggtagcccaattggtaaggaaataattattttcttttttccttttagtataaaatagttaagtgatgttaattagtatgattataataatatagttgttataattgtgaaaaaataatttataaatatattgtttacataaacaacatagtaatgtaaaaaaatatgacaagtgatgtgtaagacgaagaagataaaagttgagagtaagtatattatttttaatgaatttgatcgaacatgtaagatgatatactagcattaatatttgttttaatcataatagtaattctagctggtttgatgaattaaatatcaatgataaaatactatagtaaaaataagaataaataaattaaaataatatttttttatgattaatagtttattatataattaaatatctataccattactaaatattttagtttaaaagttaataaatattttgttagaaattccaatctgcttgtaatttatcaataaacaaaatattaaataacaagctaaagtaacaaataatatcaaactaatagaaacagtaatctaatgtaacaaaacataatctaatgctaatataacaaagcgcaagatctatcaattttatatagtattatttttcaatcaacattcttattaatttctaaataatacttgtagttttattaacttctaaatggattgactattaattaaatgaattagtcgaacatgaataaacaaggtaacatgatagatcatgtcattgtgttatcattgatcttacatttggattgattacagttgggaaattgggttcgaaatcgataatcttgcggccgctctagagaattccgagcgggcttcttcttcctcgttgaatgtcccgagccacacgcgctggtgtttctcgtaaatctgagctccccatcttccgtttggttgtggcaccacacctttgtattttgacgacggaagctttcgtcgacg

SEQ ID NO: 565 - DNA, 1526 bp, Artificial Sequence
  Artificial sequence
  P21201
atgcccaattttaatcaaagtgggaatattgctgatagctcattgtccttcactttcactaacagtagcaacggtccgaacctcataacaactcaaacaaattctcaagcgctttcacaaccaattgcctcctctaacgttcatgataacttcatgaataatgaaatcacggctagtaaaattgatgatggtaataattcaaaaccactgtcacctggttggacggaccaaactgcgtataacgcgtttggaatcactacagggatgtttaataccactacaatggatgatgtatataactatctattcgatgatgaagataccccaccaaacccaaaaaaagagggtaccgtcgacgaatcgagtagcgttgatgagagtactacaagtacaggttccatctgtgaaaccccggcgataactccggcgaaaaagtcgtcggtaggtaacttatacaggatgggaagcggatcaagcgttgtgttagattcagagaacggcgtagaagctgaatctaggaagcttccgtcgtcaaaatacaaaggtgtggtgccacaaccaaacggaagatggggagctcagatttacgagaaacaccagcgcgtgtggctcgggacattcaacgaagaagacgaagccgctcgtgcctacgacgtcgcggttcacaggttccgtcgccgtgacgccgtcacaaatttcaaagacgtgaagatggacgaagacgaggtcgatttcttgaattctcattcgaaatctgagatcgttgatatgttgaggaaacatacttataacgaagagttagagcagagtaaacggcgtcgtaatggtaacggaaacatgactaggacgttgttaacgtcggggttgagtaatgatggtgtttctacgacggggtttagatcggcggaggcactgtttgagaaagcggtaacgccaagcgacgttgggaagctaaaccgtttggttataccgaaacatcacgcagagaaacattttccgttaccgtcaagtaacgtttccgtgaaaggagtgttgttgaactttgaggacgttaacgggaaagtgtggaggttccgttactcgtattggaacagtagtcagagttatgttttgactaaaggttggagcaggttcgttaaggagaagaatctacgtgctggtgacgtggttagtttcagtagatctaacggtcaggatcaacagttgtacattgggtggaagtcgagatccgggtcagatttagatgcgggtcgggttttgagattgttcggagttaacatttcaccggagagttcaagaaacgacgtcgtaggaaacaaaagagtgaacgatactgagatgttatcgttggtgtgtagcaagaagcaacgcatctttcacgcctcgtaacaactcttcttctttttttttcttttgttgttttaataatttttaaaaactccattttcgttttctttatttgcatcggtttctttcttcttgtttaccaaaggttcatgagttgtttttgttgtattgatgaactg

SEQ ID NO: 566 - DNA, 1776 bp, Artificial Sequence
  Artificial sequence
  P25301
atggaatcgagtagcgttgatgagagtactacaagtacaggttccatctgtgaaaccccggcgataactccggcgaaaaagtcgtcggtaggtaacttatacaggatgggaagcggatcaagcgttgtgttagattcagagaacggcgtagaagctgaatctaggaagcttccgtcgtcaaaatacaaaggtgtggtgccacaaccaaacggaagatggggagctcagatttacgagaaacaccagcgcgtgtggctcgggacattcaacgaagaagacgaagccgctcgtgcctacgacgtcgcggttcacaggttccgtcgccgtgacgccgtcacaaatttcaaagacgtgaagatggacgaagacgaggtcgatttcttgaattctcattcgaaatctgagatcgttgatatgttgaggaaacatacttataacgaagagttagagcagagtaaacggcgtcgtaatggtaacggaaacatgactaggacgttgttaacgtcggggttgagtaatgatggtgtttctacgacggggtttagatcggcggaggcactgtttgagaaagcggtaacgccaagcgacgttgggaagctaaaccgtttggttataccgaaacatcacgcagagaaacattttccgttaccgtcaagtaacgtttccgtgaaaggagtgttgttgaactttgaggacgttaacgggaaagtgtggaggttccgttactcgtattggaacagtagtcagagttatgttttgactaaaggttggagcaggttcgttaaggagaagaatctacgtgctggtgacgtggttagtttcagtagatctaacggtcaggatcaacagttgtacattgggtggaagtcgagatccgggtcagatttagatgcgggtcgggttttgagattgttcggagttaacatttcaccggagagttcaagaaacgacgtcgtaggaaacaaaagagtgaacgatactgagatgttatcgttggtgtgtagcaagaagcaacgcatctttcacgcctcgtgcggccgcatggtgagcaagggcgaggagctgttcaccggggtggtgcccatcctggtcgagctggacggcgacgtaaacggccacaagttcagcgtgtccggcgagggcgagggcgatgccacctacggcaagctgaccctgaagttcatctgcaccaccggcaagctgcccgtgccctggcccaccctcgtgaccaccctgacctacggcgtgcagtgcttcagccgctaccccgaccacatgaagcagcacgacttcttcaagtccgccatgcccgaaggctacgtccaggagcgcaccatcttcttcaaggacgacggcaactacaagacccgcgccgaggtgaagttcgagggcgacaccctggtgaaccgcatcgagctgaagggcatcgacttcaaggaggacggcaacatcctggggcacaagctggagtacaactacaacagccacaacgtctatatcatggccgacaagcagaagaacggcatcaaggtgaacttcaagatccgccacaacatcgaggacggcagcgtgcagctcgccgaccactaccagcagaacacccccatcggcgacggccccgtgctgctgcccgacaaccactacctgagcacccagtccgccctgagcaaagaccccaacgagaagcgcgatcacatggtcctgctggagttcgtgaccgccgccgggatcactctcggcatggacgagctgtacaagtccggagggatcctctag

SEQ ID NO: 567 - DNA, 1281 bp, Artificial Sequence; identical to SEQ ID NO: 87
  Artificial sequence
  P383

SEQ ID NO: 568 - DNA, 1389 bp, Artificial Sequence
  Artificial sequence
  P21193
taaatggaatcgagtagcgttgatgagagtactacaagtacaggttccatctgtgaaaccccggcgataactccggcgaaaaagtcgtcggtaggtaacttatacaggatgggaagcggatcaagcgttgtgttagattcagagaacggcgtagaagctgaatctaggaagcttccgtcgtcaaaatacaaaggtgtggtgccacaaccaaacggaagatggggagctcagatttacgagaaacaccagcgcgtgtggctcgggacattcaacgaagaagacgaagccgctcgtgcctacgacgtcgcggttcacaggttccgtcgccgtgacgccgtcacaaatttcaaagacgtgaagatggacgaagacgaggtcgatttcttgaattctcattcgaaatctgagatcgttgatatgttgaggaaacatacttataacgaagagttagagcagagtaaacggcgtcgtaatggtaacggaaacatgactaggacgttgttaacgtcggggttgagtaatgatggtgtttctacgacggggtttagatcggcggaggcactgtttgagaaagcggtaacgccaagcgacgttgggaagctaaaccgtttggttataccgaaacatcacgcagagaaacattttccgttaccgtcaagtaacgtttccgtgaaaggagtgttgttgaactttgaggacgttaacgggaaagtgtggaggttccgttactcgtattggaacagtagtcagagttatgttttgactaaaggttggagcaggttcgttaaggagaagaatctacgtgctggtgacgtggttagtttcagtagatctaacggtcaggatcaacagttgtacattgggtggaagtcgagatccgggtcagatttagatgcgggtcgggttttgagattgttcggagttaacatttcaccggagagttcaagaaacgacgtcgtaggaaacaaaagagtgaacgatactgagatgttatcgttggtgtgtagcaagaagcaacgcatctttcacgcctcgcaattccccaattttaatcaaagtgggaatattgctgatagctcattgtccttcactttcactaacagtagcaacggtccgaacctcataacaactcaaacaaattctcaagcgctttcacaaccaattgcctcctctaacgttcatgataacttcatgaataatgaaatcacggctagtaaaattgatgatggtaataattcaaaaccactgtcacctggttggacggaccaaactgcgtataacgcgtttggaatcactacagggatgtttaataccactacaatggatgatgtatataactatctattcgatgatgaagataccccaccaaacccaaaaaaagagtagtaa

SEQ ID NO: 569 - DNA, 548 bp, Artificial Sequence
  Artificial sequence
  P21276
tcgacctgagatcgttgatatgttgaggaaacatacttataacgaagagttagagcagagtaaacggcgtcgtaatggtaacggaaacatgactaggacgttgttaacgtcggggttgagtaatgatggtgtttctacgacggggtttagatcggcggaggcactgtttgagaaagcggtaacgccaagcgacgttgggaagctaaaccgtttggttataccgaaacatcacgcagagaaacattttccgttaccgtcaagtaacgtttccgtgaaaggagtgttgttgaactttgaggacgttaacgggaaagtgtggaggttccgttactcgtattggaacagtagtcagagttatgttttgactaaaggttggagcaggttcgttaaggagaagaatctacgtgctggtgacgtggttagtttcagtagatctaacggtcaggatcaacagttgtacattgggtggaagtcgagatccgggtcagatttagatgcgggtcgggttttgagattgttcggagttaacatttgaccggagagttcgc

SEQ ID NO: 570 - DNA, 419 bp, Artificial Sequence
  Artificial sequence
  P21275
tcgaccttatacaggatgggaagcggatcaagcgttgtgttagattcagagaacggcgtagaagctgaatctaggaagcttccgtcgtcaaaatacaaaggtgtggtgccacaaccaaacggaagatggggagctcagatttacgagaaacaccagcgcgtgtggctcgggacattcaacgaagaagacgaagccgctcgtgcctacgacgtcgcggttcacaggttccgtcgccgtgacgccgtcacaaatttcaaagacgtgaagatggacgaagacgaggtcgatttcttgaattctcattcgaaatctgagatcgttgatatgttgaggaaacatacttataacgaagagttagagcagagtaaacggcgtcgtaatggtaacggaaacatgactaggacgtagttaacgtcggc

SEQ ID NO: 571 - DNA, 1297 bp, Artificial Sequence
  Artificial sequence
  P23315
tcgacccacgcgtccgcacaacacaaacacatttctgttttctccattgtttcaaaccataaaaaaaaacacagattaaatggaatcgagtagcgttgatgagagtactacaagtacaggttccatctgtgaaaccccggcgataactccggcgaaaaagtcgtcggtaggtaacttatacaggatgggaagcggatcaagcgttgtgttagattcagagaacggcgtagaagctgaatctaggaagcttccgtcgtcaaaatacaaaggtgtggtgccacaaccaaacggaagatggggagctcagatttacgagaaacaccagcgcgtgtggctcgggacattcaacgaagaagacgaagccgctcgtgcctacgacgtcgcggttcacaggttccgtcgccgtgacgccgtcacaaatttcaaagacgtgaagatggacgaagacgaggtcgatttcttgaattctcattcgaaatctgagatcgttgatatgttgaggaaacatacttataacgaagagttagagcagagtaaacggcgtcgtaatggtaacggaaacatgactaggacgttgttaacgtcggggttgagtaatgatggtgtttctacgacggggtttagatcggcggaggcactgtttgagaaagcggtaacgccaagcgacgttgggaagctaaaccgtttggttataccgaaacatcacgcagagaaacattttccgttaccgtcaagtaacgtttccgtgaaaggagtgttgttgaactttgaggacgttaacgggaaagtgtggaggttccgttactcgtattggaacagtagtcagagttatgttttgactaaaggttggagcaggttcgttaaggagaagaatctacgtgctggtgacgtggttagtttcagtagatctaacggtcaggatcaacagttgtacattgggtggaagtcgagatccgggtcagatttagatgcgggtcgggttttgagattgttcggagttaacatttcaccggagagttcaagaaacgacgtcgtaggaaacaaaagagtgaacgatactgagatgttatcgttggtgtgtagcaagaagcaacgcatctttcacgcctcgtaacaactcttcttctttttttttcttttgttgttttaataatttttaaaaactccattttcgttttctttatttgcatcggtttctttcttcttgtttaccaaaggttcatgagttgtttttgttgtattgatgaactgtaaattttatttataggataaattttaaaaaaaaaaaaaaaaaaaa

SEQ ID NO: 572 - DNA, 1281 bp, Artificial Sequence; identical to SEQ ID NO: 87
  Artificial sequence
  P7140

SEQ ID NO: 573 - DNA, 1614 bp, Artificial Sequence
  Artificial sequence
  P25305
taaatggaatcgagtagcgttgatgagagtactacaagtacaggttccatctgtgaaaccccggcgataactccggcgaaaaagtcgtcggtaggtaacttatacaggatgggaagcggatcaagcgttgtgttagattcagagaacggcgtagaagctgaatctaggaagcttccgtcgtcaaaatacaaaggtgtggtgccacaaccaaacggaagatggggagctcagatttacgagaaacaccagcgcgtgtggctcgggacattcaacgaagaagacgaagccgctcgtgcctacgacgtcgcggttcacaggttccgtcgccgtgacgccgtcacaaatttcaaagacgtgaagatggacgaagacgaggtcgatttcttgaattctcattcgaaatctgagatcgttgatatgttgaggaaacatacttataacgaagagttagagcagagtaaacggcgtcgtaatggtaacggaaacatgactaggacgttgttaacgtcggggttgagtaatgatggtgtttctacgacggggtttagatcggcggaggcactgtttgagaaagcggtaacgccaagcgacgttgggaagctaaaccgtttggttataccgaaacatcacgcagagaaacattttccgttaccgtcaagtaacgtttccgtgaaaggagtgttgttgaactttgaggacgttaacgggaaagtgtggaggttccgttactcgtattggaacagtagtcagagttatgttttgactaaaggttggagcaggttcgttaaggagaagaatctacgtgctggtgacgtggttagtttcagtagatctaacggtcaggatcaacagttgtacattgggtggaagtcgagatccgggtcagatttagatgcgggtcgggttttgagattgttcggagttaacatttcaccggagagttcaagaaacgacgtcgtaggaaacaaaagagtgaacgatactgagatgttatcgttggtgtgtagcaagaagcaacgcatctttcacgcctcggcggccgctgccgctgcggcagcggccatggaaaagagaagatggaaaaagaatttcatagccgtctcagcagccaaccgctttaagaaaatctcatcctccggggcacttgattatgatattccaactactgctagcgagaatttgtattttcagggtgagctcaaaaccgcggctcttgcgcaacacgatgaagccgtggacaacaaattcaacaaagaacaacaaaacgcgttctatgagatcttacatttacctaacttaaacgaagaacaacgaaacgccttcatccaaagtttaaaagatgacccaagccaaagcgctaaccttttagcagaagctaaaaagctaaatgatgctcaggcgccgaaagtagacaacaaattcaacaaagaacaacaaaacgcgttctatgagatcttacatttacctaacttaaacgaagaacaacgaaacgccttcatccaaagtttaaaagatgacccaagccaaagcgctaaccttttagcagaagctaaaaagctaaatggtgctcaggcgccgaaagtagacgcgaattccgcggggaagtcaacctga

SEQ ID NO: 574 - DNA, 1476 bp, Artificial Sequence
  Artificial sequence
  P25459
taaatggaatcgagtagcgttgatgagagtactacaagtacaggttccatctgtgaaaccccggcgataactccggcgaaaaagtcgtcggtaggtaacttatacaggatgggaagcggatcaagcgttgtgttagattcagagaacggcgtagaagctgaatctaggaagcttccgtcgtcaaaatacaaaggtgtggtgccacaaccaaacggaagatggggagctcagatttacgagaaacaccagcgcgtgtggctcgggacattcaacgaagaagacgaagccgctcgtgcctacgacgtcgcggttcacaggttccgtcgccgtgacgccgtcacaaatttcaaagacgtgaagatggacgaagacgaggtcgatttcttgaattctcattcgaaatctgagatcgttgatatgttgaggaaacatacttataacgaagagttagagcagagtaaacggcgtcgtaatggtaacggaaacatgactaggacgttgttaacgtcggggttgagtaatgatggtgtttctacgacggggtttagatcggcggaggcactgtttgagaaagcggtaacgccaagcgacgttgggaagctaaaccgtttggttataccgaaacatcacgcagagaaacattttccgttaccgtcaagtaacgtttccgtgaaaggagtgttgttgaactttgaggacgttaacgggaaagtgtggaggttccgttactcgtattggaacagtagtcagagttatgttttgactaaaggttggagcaggttcgttaaggagaagaatctacgtgctggtgacgtggttagtttcagtagatctaacggtcaggatcaacagttgtacattgggtggaagtcgagatccgggtcagatttagatgcgggtcgggttttgagattgttcggagttaacatttcaccggagagttcaagaaacgacgtcgtaggaaacaaaagagtgaacgatactgagatgttatcgttggtgtgtagcaagaagcaacgcatctttcacgcctcggcggccgcggctgccgccgcagccgctgctagttacccatacgatgttcctgactatgcgggctatccctatgacgtcccggactatgcaggatcctatccatatgacgttccggattacgcttctagatacccatacgatgttcctgactatgcgggctatccctatgacgtcccggactatgcaggatcctatccatatgacgttccagattacgctactagttacccatacgatgttcctgactatgcgggctatccctatgacgtcccggactatgcaggatcctatccatatgacgttccagattacgcttctagatacccatacgatgttcctgactatgcgggctatccctatgacgtcccggactatgcaggatcctatccatatgacgttccagattacgctactagacaggcctcgtaccagatcctctag

SEQ ID NO: 575 - DNA, 1637 bp, Artificial Sequence
  Artificial sequence
  P26265
atgagttacccatacgatgttcctgactatgcgggctatccctatgacgtcccggactatgcaggatcctatccatatgacgttccagattacgcttctagatacccatacgatgttcctgactatgcgggctatccctatgacgtcccggactatgcaggatcctatccatatgacgttccagattacgctactagttacccatacgatgttcctgactatgcgggctatccctatgacgtcccggactatgcaggatcctatccatatgacgttccagattacgcttctagatacccatacgatgttcctgactatgcgggctatccctatgacgtcccggactatgcaggatcctatccatatgacgttccagattacgctactagacaggcctcgtaccggatcctctacctagagaattccgccgctgccgctgcggcagcggctgcagcgggtaccgtcgacgaatcgagtagcgttgatgagagtactacaagtacaggttccatctgtgaaaccccggcgataactccggcgaaaaagtcgtcggtaggtaacttatacaggatgggaagcggatcaagcgttgtgttagattcagagaacggcgtagaagctgaatctaggaagcttccgtcgtcaaaatacaaaggtgtggtgccacaaccaaacggaagatggggagctcagatttacgagaaacaccagcgcgtgtggctcgggacattcaacgaagaagacgaagccgctcgtgcctacgacgtcgcggttcacaggttccgtcgccgtgacgccgtcacaaatttcaaagacgtgaagatggacgaagacgaggtcgatttcttgaattctcattcgaaatctgagatcgttgatatgttgaggaaacatacttataacgaagagttagagcagagtaaacggcgtcgtaatggtaacggaaacatgactaggacgttgttaacgtcggggttgagtaatgatggtgtttctacgacggggtttagatcggcggaggcactgtttgagaaagcggtaacgccaagcgacgttgggaagctaaaccgtttggttataccgaaacatcacgcagagaaacattttccgttaccgtcaagtaacgtttccgtgaaaggagtgttgttgaactttgaggacgttaacgggaaagtgtggaggttccgttactcgtattggaacagtagtcagagttatgttttgactaaaggttggagcaggttcgttaaggagaagaatctacgtgctggtgacgtggttagtttcagtagatctaacggtcaggatcaacagttgtacattgggtggaagtcgagatccgggtcagatttagatgcgggtcgggttttgagattgttcggagttaacatttcaccggagagttcaagaaacgacgtcgtaggaaacaaaagagtgaacgatactgagatgttatcgttggtgtgtagcaagaagcaacgcatctttcacgcctcgtaacaactcttcttctttttttttcttttgttgttttaataatttttaaaaactccattttcgttttctttatttgcatcggtttctttcttcttgtttaccaaaggttcatgagttgtttttgttgtattgatgaactg

SEQ ID NO: 576 - DNA, 1942 bp, Artificial Sequence
  Artificial sequence
  P21170
gtgttgtctataaatctacacagtcactactttctaccacactgattttaacaaaatcaattaaagttgatcagcacttatttctttcatatgggcttaaatgccaatttacttatatatattttgatgaaaatgtgtggtaaaacttaagaaacaaaaaaatcctaacactaattagcgcctaggtattttgagcaatgcctctttaacttaaaaagaaaaaaacgaaaaaagacaaaagtaattgtcctgctgtcaagaaatgcccatattattattcatccacacaagacacgtacgaccatgcctcttagtgatttgtcattggcccacttcccatcctagtggatcaaattgataataaatactataataaataattacaagaattcaaatagaaaccggcaaatcaattaatagatataaaaaggagatataaatcgttaacattttctattggagcagggagagccaataaaagtcgaatctcacgatatttcgcagttctctaattggctctttgcataaaaaatgaaacctaactaatgggtagaagaatacttttgcaaagcaacaaatatatcagataagatcgtaagctatccacatcacttgttaattgtcctcaaccatattatataatgcaaacaatttatggcgttaaatccttacgtatttattctctataagagtaaaacacacacactgaaggcaactgatttaattggatttctattgaccagtggaaatacttgttatgatgtcggtcgctcgttggctaagtatttcttataaatatataagacatatttaaaatctttttacattacatacacccacttatgagaaacaaatataataaaatgttgataccaaatatatatatatatatataataaaatgggataattacaagaacaacaaaagagagattttttatgaatttggaattggaatctatcgagtgcatatattatacggacaataatcctcatagcaatacacattttttctataaaaagaaacgtaggataagattatagaaagaagaataaaaacctggaaatggaaaataaagaagatatatatcatgagttcatgactaaacaactatttatagctttttcaataataatatcattcaagagtgaagaataacaatcagatttggaagagaaaaaaatttaaagagagacaccatttaacatcggtaggatctgaacatggttatcaaatctaatactttctattttattatttttcatatagttattatcgttactatagtattatagtgaattaaaattttaagcatcaaaactcaggggggatgaacttcactaaaatgatgtcaatatctcacgtggaccctttatccattccatggcccacacatgggtcccacttccccatgcacacagcccacaacatattcatttctatatttgttcctatactctcttttctctttttcttacataaataaaatactaacttattataaggattattattgcttcgtgtgttttcttctataagttacatcaacagttcatgaaatagaccctaatatagtaacctaaattaaatgccgtatatttcattatgtttccacgaagcttcctttgtgttctttgagttgacccatacacacccatcttacttcccatgcacctgcacatatactataattactcccctcaaacacgcattcttacaaatatattttttgttattaccaaataaaaagtgaaacataaaataataatatcagaagtgacacttgctgtttcttatttccctccccccaagctctttctccttctttctatatatattatacacacacacgtatacatatacacaacataattcacaacacaacacaaacacatttctgttttctccattgtttcaaaccataaaaaaaaactcagattaa

SEQ ID NO: 577 - DNA, 1942 bp, Artificial Sequence; identical to SEQ ID NO: 576
  Artificial sequence
  P25606

SEQ ID NO: 578 - DNA, 1297 bp, Artificial Sequence; identical to SEQ ID NO: 571
  Artificial sequence
  P21524

SEQ ID NO: 579 - DNA, 1668 bp, Artificial Sequence
  Artificial sequence
  P1898
gttaagagtctctcaaagtttaaatctttctttacaaaaaaggttacttttggttctgagtaaatcaaaatcaagcttttggccttcaatggtggctatgtttcaagaagataatggaacatcttctgtagcttcatcaccacttcaagtcttctcaactatgtcactcaacagaccgactctcctcgcttcttcatctccgtttcattgtctcaaagatctcaaaccagaggagcgtggtctctacttaatccacctcttgctaacttgtgccaaccacgtggcttcaggtagcctccaaaacgctaacgcagcgctcgagcagctctctcacctcgcttctcctgacggcgacacgatgcagcgaatcgctgcttacttcaccgaagcgcttgctaacagaatccttaagtcctggcctggtctttacaaggctcttaacgcaactcagacaagaactaacaatgtctctgaggagattcatgttagaagactcttctttgagatgttcccgatactcaaagtctcttacttgctcactaatcgagctatactcgaggctatggaaggagagaagatggttcatgtgattgatctcgatgcttctgagccagctcaatggcttgctttgcttcaagcttttaactctaggcctgaaggtccacctcatttgagaatcactggtgttcatcaccagaaggaagtgcttgaacaaatggctcatagactcattgaggaagcagagaaactcgatatcccgtttcagtttaatcccgttgtgagtaggttagactgtttaaatgtagaacagttgcgggttaaaacaggagaggccttagccgttagctcggttcttcaattgcataccttcttggcctctgatgatgatctcatgagaaagaactgcgctttacggtttcagaacaaccctagtggagttgacttgcagagagttctaatgatgagccatggctctgcagctgaggcacgtgagaatgatatgagtaacaacaatgggtatagccctagcggtgactcggcctcatctttgcctttaccaagttcaggaaggactgatagcttcctcaatgctatttggggtttgtctccaaaggtcatggtggtcactgagcaagactcagaccacaacggctccacactaatggagaggctattagaatcactttacacctacgcagcattgtttgattgcttggaaacaaaagttccaagaacgtctcaagataggatcaaagtggagaagatgctcttcggggaggagatcaagaacatcatatcctgcgagggatttgagagaagagaaagacacgagaagcttgagaaatggagccagaggatcgatttggctggttttgggaatgttcctcttagctattatgcgatgttgcaggctaggagattgcttcaagggtgcggttttgatgggtatagaatcaaggaagagagcgggtgcgcagtaatttgctggcaagatcgacctctatactcggtatcagcttggagatgcaggaagtgaatgatatattacagtttgtcttctattttggttatgagcagagtccctttcttttttgtatacatggggacacaatcttagttgttttgtgatggtgactttctgtctctttatgctattttggcttaaat

SEQ ID NO: 580 - DNA, 1668 bp, Artificial Sequence; identical to SEQ ID NO: 579
  Artificial sequence
  P4593

SEQ ID NO: 581 - DNA, 1394 bp, Artificial Sequence
  Artificial sequence
  P15491
tgtttgatctttgtccagagaactccaagatagaccaaaaaggttcaacctcaaaacaaacaacacaaaaacagccaaatagctagagaccaagatgagatcaagcagccaaaattctgaaaactccaagacttgtctatctaacaacatcaaagcaaccaccaagaatgaagaagataaagatgaagaggatgatgaagaaggcgaagaggatgaagaagagagatctggagatcagagcccatctagcaatagctatgaggaagagagtgggagtcaccaccatgatcagaacaagaagaatggaggatccgtgaggccgtacaaccgctcaaagactccgaggctgcgatggacgccggagctccatatttgctttcttcaagctgtggagagattgggtggcccagatagagcaacaccgaagcttgttctccaattgatgaacgtcaaggggctaagtattgcccatgttaagagtcatcttcagatgtacagaagcaagaagaccgatgagcctaatgaaggagatcaaggattttcgtttgaacacggagctggttacacttacaaccttagccaacttccaatgctacaaagttttgatcaaaggccttcttctagtttaggatatggtggtggttcgtggactgaccacagacgacagatctaccgtagcccttggagaggattaacgacacgagaaaatacaagaacaagacaaacaatgtttagctcacagcctggtgagagatatcacggagttagcaatagtattcttaacgataagaacaaaactatttcatttcgaatcaattctcatgaaggggttcatgataacaatggagtagctggagctgttccaagaattcatagaagttttcttgaaggtatgaaaacgtttaacaaatcatggggacagagcctctcttccaatcttaagtcctccaccgcaacaataccacaagatcatattgctacaacgctaaattcttatcaatgggagaatgctggagtggcagaaggatcagagaatgttttgaagaggaagaggttattattttctgatgactgcaataagtcagaccaagatttggatctaagcttgtcccttaaggtacctcggacacacgacaatcttggagaatgcttgttagaagatgaagtaaaagaacatgatgatcatcaagatatcaagagtttgtctctttcgttatcatcttcaggttcatcaaaactcgaccgaaccattaggaaagaagatcaaactgatcacaaaaagagaaagatttcggtcttggcaagtccccttgatctcactctgtgaatatgtataacaacttatatacgtatattctaagtgagatcttgtggtacttgttgatggaagacgg

SEQ ID NO: 582 - DNA, 1560 bp, Artificial Sequence
  Artificial sequence
  P26217
atgcaatcaaaaccgggaagagaaaacgaagaggaagtcaataatcaccatgctgttcagcagccgatgatgtatgcagagccctggtggaaaaacaactcctttggtgttgtacctcaagcgagaccttctggaattccatcaaattcctcttctttggattgccccaatggttccgagtcaaacgatgttcattcagcatctgaagacggtgcgttgaatggtgaaaacgatggcacttggaaggattcacaagctgcaacttcctctcgttcagataatcacggaatggaaggaaatgacccagcgctctctatccgtaacatgcatgatcagccacttgtacaaccaccagagcttgttggacactatatcgcttgtgtcccaaacccatatcaggatccatattatgggggattgatgggagcatatggtcatcagcaattgggttttcgtccatatcttggaatgcctcgtgaaagaacagctctgccacttgacatggcacaagagcccgtttatgtgaatgcaaagcagtacgagggaattctaaggcgaagaaaagcacgtgccaaggcagagctagagaggaaagtcatccgggacagaaagccatatcttcacgagtcaagacacaagcatgcaatgagaagggcacgagcgagtggaggccggtttgcgaagaaaagtgaggtagaagcgggagaggatgcaggagggagagacagagaaaggggttcagcaaccaactcatcaggctctgaacaagttgagacagactctaatgagaccctgaattcttctggtgcaccagcggccgctgccgctgcggcagcggccatggtgagcaagggcgaggagctgttcaccggggtggtgcccatcctggtcgagctggacggcgacgtaaacggccacaagttcagcgtgtccggcgagggcgagggcgatgccacctacggcaagctgaccctgaagttcatctgcaccaccggcaagctgcccgtgccctggcccaccctcgtgaccaccttcggctacggcctgcagtgcttcgcccgctaccccgaccacatgaagcagcacgacttcttcaagtccgccatgcccgaaggctacgtccaggagcgcaccatcttcttcaaggacgacggcaactacaagacccgcgccgaggtgaagttcgagggcgacaccctggataaccgaatcgagctgaagggcatcgacttcaaggaggacggcaacatcctggggcacaagctggagtacaactacaacagccacaacgtctatatcatggccgacaagcagaagaacggcatcaaggtgaacttcaagatccgccacaacatcgaggacggcagcgtgcagctcgccgaccactaccagcagaacacccccatcggcgacggccccgtggtgctgcccgacaaccactacctgagctaccagtccgccctgagcaaagaccccaacgagaagcgcgatcacatggtcctgctggagttcgtgaccgccgccgggatcactctcggcatggacgagctgtacaagtaa

SEQ ID NO: 583 - DNA, 1304 bp, Artificial Sequence
  Artificial sequence
  P142
ggaatctgaagctcttctctactctctactctatcactccatctgtgaacatatctttcttattcttctaggcactatctatttttcactttttgtaattggaatttggagatggctatgcaaactgtgagagaaggtctcttctctgctccacagacttcttggtggactgcttttggatctcagccgttggctccggagagtctcgccggcgattctgactcattcgccggagttaaggtcggatctgtcggagagacaagacaacgtgtggataaacagagcaactctgcaacgcacttagctttctcacttggtgatgtaaagagtccaagacttgtgccaaagcctcatggagctactttctcaatgcaatcaccttgcttggaacttggattttctcagccaccgatctatacaaagtatccctatggagaacaacaatactatggagttgtttcagcctatggatctcagagcagggtaatgcttcctctaaacatggaaacggaagatagtaccatctatgtgaactcaaagcaataccatggaatcataaggagacgccaatcccgcgcaaaggctgctgctgttcttgatcagaagaaattgagtagtagatgccgcaagccatatatgcatcattcgcgccatctccatgcattgcggcgtcctagaggatccggtgggagattcttgaacactaaaagtcagaacttggaaaatagcggaaccaatgcaaagaaaggtgatggaagtatgcagattcagtctcagcctaagcctcagcaaagtaactctcagaattctgaagttgttcatccggaaaacgggaccatgaacttatcgaacggattaaatgtgtcgggatcagaagttactagcatgaactacttcctaagttctcccgttcattctcttggtggcatggtaatgcctagcaagtggatagcagcagcagcagcaatggataatggctgctgcaatttcaaaacctgatcctttaccgtttcacagtcaaacggagagagataaagaactcttgccttggtataaaggattttcctttttgccaatccgctttggctgtgaacaggcaaatcatctttggctcattctctattaaggtaacttcgccgtgaggtgaaaaaagctttgatatatttatcttcagtgtaaaagtagttaaaactggtgaagaacaatgatgtgtttggtcactaaacccacttgttccaactagtagtgtgtgttttaagaaaactctgttatctgattttgtagctctctctggctttgtgtgt

SEQ ID NO: 584 - DNA, 1632 bp, Artificial Sequence
  Artificial sequence
  P26197
atggctatgcaaactgtgagagaaggtctcttctctgctccacagacttcttggtggactgcttttggatctcagccgttggctccggagagtctcgccggcgattctgactcattcgccggagttaaggtcggatctgtcggagagacaagacaacgtgtggataaacagagcaactctgcaacgcacttagctttctcacttggtgatgtaaagagtccaagacttgtgccaaagcctcatggagctactttctcaatgcaatcaccttgcttggaacttggattttctcagccaccgatctatacaaagtatccctatggagaacaacaatactatggagttgtttcagcctatggatctcagagcagggtaatgcttcctctaaacatggaaacggaagatagtaccatctatgtgaactcaaagcaataccatggaatcataaggagacgccaatcccgcgcaaaggctgctgctgttcttgatcagaagaaattgagtagtagatgccgcaagccatatatgcatcattcgcgccatctccatgcattgcggcgtcctagaggatccggtgggagattcttgaacactaaaagtcagaacttggaaaatagcggaaccaatgcaaagaaaggtgatggaagtatgcagattcagtctcagcctaagcctcagcaaagtaactctcagaattctgaagttgttcatccggaaaacgggaccatgaacttatcgaacggattaaatgtgtcgggatcagaagttactagcatgaactacttcctaagttctcccgttcattctcttggtggcatggtaatgcctagcaagtggatagcagcagcagcagcaatggataatggctgctgcaatttcaaaaccgcggccgctgccgctgcggcagcggccatggtgagcaagggcgaggagctgttcaccggggtggtgcccatcctggtcgagctggacggcgacgtaaacggccacaagttcagcgtgtccggcgagggcgagggcgatgccacctacggcaagctgaccctgaagttcatctgcaccaccggcaagctgcccgtgccctggcccaccctcgtgaccaccttcggctacggcctgcagtgcttcgcccgctaccccgaccacatgaagcagcacgacttcttcaagtccgccatgcccgaaggctacgtccaggagcgcaccatcttcttcaaggacgacggcaactacaagacccgcgccgaggtgaagttcgagggcgacaccctggataaccgaatcgagctgaagggcatcgacttcaaggaggacggcaacatcctggggcacaagctggagtacaactacaacagccacaacgtctatatcatggccgacaagcagaagaacggcatcaaggtgaacttcaagatccgccacaacatcgaggacggcagcgtgcagctcgccgaccactaccagcagaacacccccatcggcgacggccccgtggtgctgcccgacaaccactacctgagctaccagtccgccctgagcaaagaccccaacgagaagcgcgatcacatggtcctgctggagttcgtgaccgccgccgggatcactctcggcatggacgagctgtacaagtaa

SEQ ID NO: 585 - DNA, 1486 bp, Artificial Sequence
  Artificial sequence
  P143
cccaggaaaggtaaaagagacggagacgaaccaaaacaaggaagaaagaagaagatcttacatacgaagatcactctctgattcactctgagagacaaactggtttactttggttctgtttgacaaaaggagacatgcaaaaataaatctctatcccttgtttttcttcttcgcttcatcgattactcaaagaggttgttggttgtgagaataattagcttgttaaggaagacgttatgatgcatcagatgttgaataagaaagattcagctactcattccactttgccataccttaatactagcatctcttggggagtggttccaactgattccgttgctaatcgtcgcggtcctgctgaatcactaagcttgaaggttgattcaagacctgggcatatacaaactacaaagcaaatcagttttcaggaccaagattcatcttcaacacagtccactggtcaatcttatactgaagttgctagtagtggtgatgataatccttccagacaaatctccttttcggctaaatcaggatctgaaataactcaacggaaggggtttgcaagtaatcctaaacaaggctcgatgactggatttccgaatattcactttgctcctgcacaggctaatttctcatttcactatgctgatccacattatggtggtttattagctgcaacttacctaccacaggcaccaacatgcaatcctcaaatggtgagtatgattcctggtcgtgttcctttaccagcagagctcacagaaactgatccagtctttgtcaatgcgaagcaataccacgcaattatgaggaggagacagcaacgtgctaagcttgaggctcaaaacaaactaatcagagcccgtaagccctatcttcatgagtctcgacatgttcatgctcttaaaaggccaagaggatctggtggaagattcctaaacaccaaaaaacttcttcaagaatccgaacaggctgctgctagagaacaagaacaggacaagttaggccaacaggtaaacagaaagaccaacatgtctagattcgaagctcatatgctgcagaacaacaaagaccgcagctcaaccacttctggctcagacatcacctctgtttccgacggtgctgatatctttggacacactgaattccagttttcaggtttcccaactccgataaaccgagccatgcttgttcatggtcagtctaatgacatgcatggaggtggagacatgcaccatttctctgtccatatctgagacagtggatcttggtgctgtgttcatgttcccaccaagaaggggaagtcatccttggctactactagttctttcgcttgttgtaacttcagtgtttttatttcatattatgtctgtgttagacatcacaagaacgaccaagatcttcactttgaaacactctattaccttttcatcttctgttaccatggatctcttgtctaaactagtgatatgattcttctgat

SEQ ID NO: 586 - DNA, 1767 bp, Artificial Sequence
  Artificial sequence
  P26223
atgatgcatcagatgttgaataagaaagattcagctactcattccactttgccataccttaatactagcatctcttggggagtggttccaactgattccgttgctaatcgtcgcggttctgctgaatcactaagcttgaaggttgattcaagacctgggcatatacaaactacaaagcaaatcagttttcaggaccaagattcatcttcaacacagtccactggtcaatcttatactgaagttgctagtagtggtgatgataatccttccagacaaatctccttttcggctaaatcaggatctgaaataactcaacggaaggggtttgcaagtaatcctaaacaaggctcgatgactggatttccgaatattcactttgctcctgcacaggctaatttctcatttcactatgctgatccacattatggtggtttattagctgcaacttacctaccacaggcaccaacatgcaatcctcaaatggtgagtatgattcctggtcgtgttcctttaccagcagagctcacagaaactgatccagtctttgtcaatgcgaagcaataccacgcaattatgaggaggagacagcaacgtgctaagcttgaggctcaaaacaaactaatcagagcccgtaagccctatcttcatgagtctcgacatgttcatgctcttaaaaggccaagaggatctggtggaagattcctaaacaccaaaaaacttcttcaagaatccgaacaggctgctgctagagaacaagaacaggacaagttaggccaacaggtaaacagaaagaccaacatgtctagattcgaagctcatatgctgcagaacaacaaagaccgcagctcaaccacttctggctcagacatcacctctgtttccgacggtgctgatatctttggacacactgaattccagttttcaggtttcccaactccgataaaccgagccatgcttgttcatggtcagtctaatgacatgcatggaggtggagacatgcaccatttctctgtccatatcgcggccgctgccgctgcggcagcggccatggtgagcaagggcgaggagctgttcaccggggtggtgcccatcctggtcgagctggacggcgacgtaaacggccacaagttcagcgtgtccggcgagggcgagggcgatgccacctacggcaagctgaccctgaagttcatctgcaccaccggcaagctgcccgtgccctggcccaccctcgtgaccaccttcggctacggcctgcagtgcttcgcccgctaccccgaccacatgaagcagcacgacttcttcaagtccgccatgcccgaaggctacgtccaggagcgcaccatcttcttcaaggacgacggcaactacaagacccgcgccgaggtgaagttcgagggcgacaccctggataaccgaatcgagctgaagggcatcgacttcaaggaggacggcaacatcctggggcacaagctggagtacaactacaacagccacaacgtctatatcatggccgacaagcagaagaacggcatcaaggtgaacttcaagatccgccacaacatcgaggacggcagcgtgcagctcgccgaccactaccagcagaacacccccatcggcgacggccccgtggtgctgcccgacaaccactacctgagctaccagtccgccctgagcaaagaccccaacgagaagcgcgatcacatggtcctgctggagttcgtgaccgccgccgggatcactctcggcatggacgagctgtacaagtaa

SEQ ID NO: 587 - DNA, 1099 bp, Artificial Sequence
  Artificial sequence
  P1268
caaatatggaatacagctgtgtagacgacagtagtacaacgtcagaatctctctccatctctactactccaaagccgacaacgacgacggagaagaaactctcttctccgccggcgacgtcgatgcgtctctacagaatgggaagcggcggaagcagcgtcgttttggattcagagaacggcgtcgagaccgagtcacgtaagcttccttcgtcgaaatataaaggcgttgtgcctcagcctaacggaagatggggagctcagatttacgagaagcatcagcgagtttggctcggtactttcaacgaggaagaagaagctgcgtcttcttacgacatcgccgtgaggagattccgcggccgcgacgccgtcactaacttcaaatctcaagttgatggaaacgacgccgaatcggcttttcttgacgctcattctaaagctgagatcgtggatatgttgaggaaacacacttacgccgatgagtttgagcagagtagacggaagtttgttaacggcgacggaaaacgctctgggttggagacggcgacgtacggaaacgacgctgttttgagagcgcgtgaggttttgttcgagaagactgttacgccgagcgacgtcgggaagctgaaccgtttagtgataccgaaacaacacgcggagaagcattttccgttaccggcgatgacgacggcgatggggatgaatccgtctccgacgaaaggcgttttgattaacttggaagatagaacagggaaagtgtggcggttccgttacagttactggaacagcagtcaaagttacgtgttgaccaagggctggagccggttcgttaaagagaagaatcttcgagccggtgatgtggtttgtttcgagagatcaaccggaccagaccggcaattgtatatccactggaaagtccggtctagtccggttcagactgtggttaggctattcggagtcaacattttcaatgtgagtaacgagaaaccaaacgacgtcgcagtagagtgtgttggcaagaagagatctcgggaagatgatttgttttcgttagggtgttccaagaagcaggcgattatcaacatcttgtgacaaattct

SEQ ID NO: 588 - DNA, 1105 bp, Artificial Sequence
  Artificial sequence
  P21149
tcgaccaaatatggaatacagctgtgtagacgacagtagtacaacgtcagaatctctctccatctctactactccaaagccgacaacgacgacggagaagaaactctcttctccgccggcgacgtcgatgcgtctctacagaatgggaagcggcggaagcagcgtcgttttggattcagagaacggcgtcgagaccgagtcacgtaagcttccttcgtcgaaatataaaggcgttgtgcctcagcctaacggaagatggggagctcagatttacgagaagcatcagcgagtttggctcggtactttcaacgaggaagaagaagctgcgtcttcttacgacatcgccgtgaggagattccgcggccgcgacgccgtcactaacttcaaatctcaagttgatggaaacgacgccgaatcggcttttcttgacgctcattctaaagctgagatcgtggatatgttgaggaaacacacttacgccgatgagtttgagcagagtagacggaagtttgttaacggcgacggaaaacgctctgggttggagacggcgacgtacggaaacgacgctgttttgagagcgcgtgaggttttgttcgagaagactgttacgccgagcgacgtcgggaagctgaaccgtttagtgataccgaaacaacacgcggagaagcattttccgttaccggcgatgacgacggcgatggggatgaatccgtctccgacgaaaggcgttttgattaacttggaagatagaacagggaaagtgtggcggttccgttacagttactggaacagcagtcaaagttacgtgttgaccaagggctggagccggttcgttaaagagaagaatcttcgagccggtgatgtggtttgtttcgagagatcaaccggaccagaccggcaattgtatatccactggaaagtccggtctagtccggttcagactgtggttaggctattcggagtcaacattttcaatgtgagtaacgagaaaccaaacgacgtcgcagtagagtgtgttggcaagaagagatctcgggaagatgatttgttttcgttagggtgttccaagaagcaggcgattatcaacatcttgtgacaaattctg

SEQ ID NO: 589 - DNA, 913 bp, Artificial Sequence; identical to SEQ ID NO: 151
  Artificial sequence
  P417

SEQ ID NO: 590 - DNA, 1634 bp, Artificial Sequence
  Artificial sequence
  P25647
tcatcatgacatttgaaaattatataaacccaaatcataaagaaacaagaaacaatatgaaaacaatatattcctaagatacagcaaaagtggatgtatgtgaaacgtccaaagagataatttgaggattagctgcggagttcaaacataaaaacgaaagttcaactactactttcatatttaattaatcaaagtatttaattgcaaaacggaacttaacctgattggatccataagtatattatcattattcttttaccaaagaaataaataaattcgtttttaatcatatttagagctattcatgttcttgtaatcaattaaaagtttcatttgtttacaaacataacatcatatatacactcaaaaacagcaaaattgaaataaccatctgaccagaatgatgtgtttgaaccaaaactactcttggaatcgaatatagattaaaaatatatagtaaactaatttttagagagtttgagtgactattgactaaactatgcttccgtgaaggaggtcccttttgcaagtggacatacgtgagagacccaccattaatttgtctttgagccttattgttgttattgacttttagccaatagaaagagatggaaattcaataattatccacaaaattccaaatcattggtgtacaaaaagatctaaggctgttatattttcaaaaaagaaagaaaagaaatgcaacaaatatggattaaactgtggtttgtaaattgagctttgcatgaaaactttatcactatgatttcactactccatatttattgactaaagtggcactaatgaatttcttaatcatgaaatcttgtatcaaaaagtactaaaataaacatgacattggcaattaggaaaattctaaattagaaattagtaaaaatgaaaggtgaaagggaaagatgatgatatgaattggttggtgaccaggagaaatgtatcccgatttttgcagacactttcagtgtccccattcatataattatggcccacctcgttaagatttttcattcaccaccataacaagatctaagcttagatttcatgtaattaaacatataatatacttgccaatactatctaataaagtatacttaagcaaaaattattactctagtgtaaggcgatgaaatataagtttagttgaaaatttatgtcgatataacaaagtataatgaattaagaccttggttttcgattaacaaactaattaaacactagttttgcctaataaaaccgggaatcgtattcaaaaccgaacgacaaaacaagggacaagttgagagacaaaaccaaatcagcatctttcttccagaaatgtcatgaccacatgacgtcatcttgacccttcttcattgtgatatctgtggataaagcgcacgtgtttaattcacgaaccttcgtagtaacgaaaaatccacaactttcatattttttaattacccactaaactaaaacaaatttggaaaaacatgaaaaactttttctttttttccaggttcgtgaacctcgtaccctctatataaacctcttaaccaccttccacatagaaaaaagttcagatatttgataaatcaatcaacaaaacaaaaaaaactctatagttagtttctctgaaa

SEQ ID NO: 591 - DNA, 1634 bp, Artificial Sequence; identical to SEQ ID NO: 590
  Artificial sequence
  P25646

SEQ ID NO: 592 - DNA, 938 bp, Artificial Sequence; identical to SEQ ID NO: 127
  Artificial sequence
  P1079

SEQ ID NO: 593 - DNA, 1473 bp, Artificial Sequence; identical to SEQ ID NO: 119
  Artificial sequence
  P443

SEQ ID NO: 594 - DNA, 1473 bp, Artificial Sequence; identical to SEQ ID NO: 119
  Artificial sequence
  P7832

SEQ ID NO: 595 - DNA, 1896 bp, Artificial Sequence
  Artificial sequence
  P25099
gtgattcaccaaattcgacataaggcaacaaattggagtacttatcaataatttttgaaaatataaagtagtagtatcaactaatttgacattttgataattatcagctagtcttatcacattaatggatcattaactttctccaaacttatcatcaaaaagggtccactccgttttacgatatttaaaggagtatacatgggtagatctcactatctcagtatagaacaaaggaccattacctagattgattgttctacgttatgcgccttatgccctcttgacaataaaagtgaatataaagtactttagtagaacattgattctttgatatataattagctcgggtttagcaagataatttagtagcaaccaaaaaaaaaaaaaacacatcacaagcagaattaatcaattgttgttctgcagcgcttaaaagtgactaattctcttcttctttttctatagtaaagatggttcgtatccgtttgtttattatagaacgtgggttcttcttagaatattgtattcgcaagccatatactatatatctattttaaattattatacattatatttttacaaaattagttgacaaaactaataataatactatacatgtaaattttttttcttttcttcttctatataactcacgttctgcatccagtttgaatatgaataataacatatatcagcagcactatgcaaatcacaagcctacaaatatctagtaataatgcaagtttatactaagttttacaataaaaagatgcgtaagtaaattaaaattctaaataaaatgacctatagtagtattttctcaagtaagagaagactaaatagtactatttctcatttttacttatacgaaaaccttttaattaagttactaaaaccataaataagttagtaacatgataataacatttatcaaataacttttgtttaaacataacctccacgcgccttaaagggaatgtaggattcgttttaatccttgtgtacccaacttccacttgacattttttttttttttttttttgttaaatgatacgttttctttagctcgtatataatagtatctgataaacaaattgaccaaatgttatctcttctgttaatcttatctcatgctttcaaatataagaattccttctctaaatttcttttgtattatccgattggagccaaacaaaaactgcgacgaacccctagttttctttggtagatcttatgtaaggataaccacttacacacataaatttttttgtcggcatttgtgtatatgtaataaatagtattaatttacttaaaaaagaacatattattcaaataataattattatattaatgatataataaaggggactgtttctccgctaaattctcggtgtatgtctttgcttttactttcctcgttcaatgagaggaccaaaaatttattgcagagtcgcacatgaatctcaagcttctctctcctttttttcccatagcacatcagaatcgctaaatacgactcctatgcaaagaagaagctacttctttctcttgccctaattaatctacctaactagggtttcctcttacctttcatgagagagatcatttaacataagtcaccttttttatatcttttgcttcgtctttaatttagttctgttcttggtctgtttctatattttgtcggcttgcgtaaccgatcacaccttaatgctttagctattgtttcctcaaaatcatgagttttgacttctcgatctgagttttctttttctctctttacgctcttcttcacctagctaccaatatatgaacgagcaggatcaagaatcgagaaattgatttgagctggcgaataagcagtggtgggatagggaattagtagatgcggcggcg

SEQ ID NO: 596 - DNA, 1116 bp, Artificial Sequence; identical to SEQ ID NO: 139
  Artificial sequence
  P1178

SEQ ID NO: 597 - DNA, 1959 bp, Artificial Sequence
  Artificial sequence
  P25101
gtctctcttctccaatcttgaatctccgatgtatcggacgttatcaaggaatacatttgcacgagatccatgttcaaacaaacatgaaatttagcgtattaaaggaccaaatgtttttcttaaaaaaacatttctatgtaattaggatccatatttcaaatttgaacaaagaccattgtgtctttttgctatttttgagtcggtcctgcctacattgattcaaaatctcttttatgttcgtatacttcgtcaaaatctctgcatagtcacattcgtctgctgaagagtaccaactcccaaatattttcttgtatgctcttccattaacatcttttctaagctaatgaaaactagatatttgccttaggtccaaaactaaatctatcttctttcctcatagttttctcaatttccggcaactcacattatctcaattctaactagagtgtcaaagagtttttgagatgaaatacctctaaaagccagttagacaaagataagttactaaacttgtagattcagccttgtaactactagcttagaaaaaccttatggatttagaacatggttcaagaattttccatatggtttcaattgtggtttacgggatgattagttgagattgtagcggtaaattgtggcttaaaatattgatgttatatatatattgtttttaacataggttatgagttaaaataataataataactaaagctacagattattgactcttaaaaaaacgaaatagaggaatacattatatagatggtctaagtttgactcgttttaaccgttagctacttaattattaggtgaaaattcaaaatattcaagtgtacaaagtacttgttttagattagaaattttttttttttttttttgtaaattagattggatactttggattaactattctttttttggattctatattcaaacgtatcaatatcagtcatatcttattatagaaatagggtaaaagagttgtcgagagtggagacgtcggggcaagggaaaatgacgtgctccccaccaccccaatgctcacgcgcactatgccccacttaaccctaatttccaatgctaatctatcaattacatttcatttatttcttcatttatttaaagataactacacttattgtatgtataaactgcaaaacatatgatactaatatttactactctagtgaaagaagaaaatgatctggctagttccccatgccacaacattccaacacaatacatttatctcttttggtcttggggttttacaaattgtatcagagtaaacaagaatatgttttctaaaatagttttccccataaaccgatctttcctaaaatattacaccatgtgaaacccaagacttgtctaggcaacctcagtaatatgagtgtataattaaagttctggcagaaaattataagatgaattcattaaatacgttatggagcttaggactttggcataatcggtattcaatcccactgttatttaaaatagactcatataaaaattgtccagtatattttatatattaataaaaagagagtacacacatagtattgcgttcttggattctatataaaccctatataaataatactaacttgtgaaaaattaattattgcccactttctctctctctctctctctctgattgattcttgaaaagaaaatcaaagtctcaatagctttgttttgattctagttccattccacaattgcatctaattctcctaccgtagccttttcttctttatttgtcatcaacaactcctaaaattcatatgaaattagagaaatcgaaacgaaaagataatatttttcaagaaagagctacatatacaccttttgaccttgtaaagttggaaccctagaggcctttcaagcaaatcatcagggtaacaatttcttgatctttctttttagcgaatttccagtttttggtcaatc

SEQ ID NO: 598 - DNA, 1959 bp, Artificial Sequence; identical to SEQ ID NO: 597
  Artificial sequence
  P25102

SEQ ID NO: 599 - DNA, 1861 bp, Artificial Sequence
  Artificial sequence
  P21295
tcgacgccggttcggacatatccgaggcagtctccacctacgccactcgtcgcggctgcggcgtttgcattataagcggcacgggtgcggtcactaacgtcacgatacggcaacctgcggctccggctggtggaggtgtgattaccctgcatggtcggtttgacattttgtctttgaccggtactgcgcttccaccgcctgcaccaccgggagcaggaggtttgacggtgtatctagccggaggtcaaggacaagttgtaggagggaatgtggctggttcgttaattgcttcgggaccggtagtgttgatggctgcttcttttgcaaacgcagtttatgataggttaccgattgaagaggaagaaaccccaccgccgagaaccaccggggtgcagcagcagcagccggaggcgtctcagtcgtcggaggttacggggagtggggcccaggcgtgtgagtcaaacctccaaggtggaaatggtggaggaggtgttgctttctacaatcttcgaattcggtagcccaattggtaaggaaataattattttcttttttccttttagtataaaatagttaagtgatgttaattagtatgattataataatatagttgttataattgtgaaaaaataatttataaatatattgtttacataaacaacatagtaatgtaaaaaaatatgacaagtgatgtgtaagacgaagaagataaaagttgagagtaagtatattatttttaatgaatttgatcgaacatgtaagatgatatactagcattaatatttgttttaatcataatagtaattctagctggtttgatgaattaaatatcaatgataaaatactatagtaaaaataagaataaataaattaaaataatatttttttatgattaatagtttattatataattaaatatctataccattactaaatattttagtttaaaagttaataaatattttgttagaaattccaatctgcttgtaatttatcaataaacaaaatattaaataacaagctaaagtaacaaataatatcaaactaatagaaacagtaatctaatgtaacaaaacataatctaatgctaatataacaaagcgcaagatctatcaattttatatagtattatttttcaatcaacattcttattaatttctaaataatacttgtagttttattaacttctaaatggattgactattaattaaatgaattagtcgaacatgaataaacaaggtaacatgatagatcatgtcattgtgttatcattgatcttacatttggattgattacagttgggaaattgggttcgaaatcgataagcttgcggccgctctagagaattcgaagattgtagaaagcaacacctcctccaccatttccaccttggaggtttgactcacacgcctgggccccactccccgtaacctccgacgactgagacgcctccggctgctgctgctgcaccccggtggttctcggcggtggggtttcttcctcttcaatcggtaacctatcataaactgcgtttgcaaaagaagcagccatcaacactaccggtcccgaagcaattaacgaaccagccacattccctcctacaacttgtccttgacctccggctagatacaccgtcaaacctcctgctcccggtggtgcaggcggtggaagcgcagtaccggtcaaagacaaaatgtcaaaccgaccatgcagggtaatcacacctccaccagccggagccgcaggttgccgtatcgtgacgttagtgaccgcacccgtgccgcttataatgcaaacgccgcagccgcgacgagtggcgtaggtggagactgcctcggatatgtccgaaccggcgtcgacg

SEQ ID NO: 600 - DNA, 1053 bp, Artificial Sequence
  Artificial sequence
  P21301
tcgacccgtccacgtggtcgtcctgcgggatccaagaacaagccgaagccaccggtgatagtgactagagatagccccaacgtgcttagatcacacgttcttgaagtcggaattcggtagcccaattggtaaggaaataattattttcttttttccttttagtataaaatagttaagtgatgttaattagtatgattataataatatagttgttataattgtgaaaaaataatttataaatatattgtttacataaacaacatagtaatgtaaaaaaatatgacaagtgatgtgtaagacgaagaagataaaagttgagagtaagtatattatttttaatgaatttgatcgaacatgtaagatgatatactagcattaatatttgttttaatcataatagtaattctagctggtttgatgaattaaatatcaatgataaaatactatagtaaaaataagaataaataaattaaaataatatttttttatgattaatagtttattatataattaaatatctataccattactaaatattttagtttaaaagttaataaatattttgttagaaattccaatctgcttgtaatttatcaataaacaaaatattaaataacaagctaaagtaacaaataatatcaaactaatagaaacagtaatctaatgtaacaaaacataatctaatgctaatataacaaagcgcaagatctatcaattttatatagtattatttttcaatcaacattcttattaatttctaaataatacttgtagttttattaacttctaaatggattgactattaattaaatgaattagtcgaacatgaataaacaaggtaacatgatagatcatgtcattgtgttatcattgatcttacatttggattgattacagttgggaaattgggttcgaaatcgataatcttgcggccgcgaattccgacttcaagaacgtgtgatctaagcacgttggggctatctctagtcactatcaccggtggcttcggcttgttcttggatcccgcaggacgaccacgtggacgggtcgact

SEQ ID NO: 601 - DNA, 1757 bp, Artificial Sequence
  Artificial sequence
  P21205
tacagagacctgaagattccagaaccccacctgatcaaaataacatggaacttaacagatctgaagcagacgaagcaaaggccgagaccactcccaccggtggagccaccagctcagccacagcctctggctcttcctccggacgtcgtccacgtggtcgtcctgcaggttccaaaaacaaacccaaacctccgacgattataactagagatagtcctaacgtccttagatcacacgttcttgaagtcacctccggttcggacatatccgaggcagtctccacctacgccactcgtcgcggctgcggcgtttgcattataagcggcacgggtgcggtcactaacgtcacgatacggcaacctgcggctccggctggtggaggtgtgattaccctgcatggtcggtttgacattttgtctttgaccggtactgcgcttccaccgcctgcaccaccgggagcaggaggtttgacggtgtatctagccggaggtcaaggacaagttgtaggagggaatgtggctggttcgttaattgcttcgggaccggtagtgttgatggctgcttcttttgcaaacgcagtttatgataggttaccgattgaagaggaagaaaccccaccgccgagaaccaccggggtgcagcagcagcagccggaggcgtctcagtcgtcggaggttacggggagtggggcccaggcgtgtgagtcaaacctccaaggtggaaatggtggaggaggtgttgctttctacaatcttggaatgaatatgaacaattttcaattctccgggggagatatttacggtatgagcggcggtagcggaggaggtggtggcggtgcgactagacccgcgtttgcggccgctgaagctcgaaaaacaaagaaaaaaatcaaagggattcagcaagccactgcaggagtctcacaagacacttcggaaaatcctaacaaaacaatagttcctgcagcattaccacagctcacccctaccttggtgtcactgctggaggtgattgaacccgaggtgttgtatgcaggatatgatagctctgttccagattcagcatggagaattatgaccacactcaacatgttaggtgggcgtcaagtgattgcagcagtgaaatgggcaaaggcgataccaggcttcagaaacttacacctggatgaccaaatgaccctgctacagtactcatggatgtttctcatggcatttgccctgggttggagatcatacagacaatcaagtggaaacctgctctgctttgctcctgatctgattattaatgagcagagaatgtctctaccctgcatgtatgaccaatgtaaacacatgctgtttgtctcctctgaattacaaagattgcaggtatcctatgaagagtatctctgtatgaaaaccttactgcttctctcctcagttcctaaggaaggtctgaagagccaagagttatttgatgagattcgaatgacttatatcaaagagctaggaaaagccatcgtcaaaagggaagggaactccagtcagaactggcaacggttttaccaactgacaaagcttctggactccatgcatgaggtggttgagaatctccttacctactgcttccagacatttttggataagaccatgagtattgaattcccagagatgttagctgaaatcatcactaatcagataccaaaatattcaaatggaaatatcaaaaagcttctgtttcatcaaaaatctagacaggcctcgtaccggatcctctag

SEQ ID NO: 602 - DNA, 1918 bp, Artificial Sequence
  Artificial sequence
  P21280
tacagagacctgaagattccagaaccccacctgatcaaaataacatggaacttaacagatctgaagcagacgaagcaaaggccgagaccactcccaccggtggagccaccagctcagccacagcctctggctcttcctccggacgtcgtccacgtggtcgtcctgcaggttccaaaaacaaacccaaacctccgacgattataactagagatagtcctaacgtccttagatcacacgttcttgaagtcacctccggttcggacatatccgaggcagtctccacctacgccactcgtcgcggctgcggcgtttgcattataagcggcacgggtgcggtcactaacgtcacgatacggcaacctgcggctccggctggtggaggtgtgattaccctgcatggtcggtttgacattttgtctttgaccggtactgcgcttccaccgcctgcaccaccgggagcaggaggtttgacggtgtatctagccggaggtcaaggacaagttgtaggagggaatgtggctggttcgttaattgcttcgggaccggtagtgttgatggctgcttcttttgcaaacgcagtttatgataggttaccgattgaagaggaagaaaccccaccgccgagaaccaccggggtgcagcagcagcagccggaggcgtctcagtcgtcggaggttacggggagtggggcccaggcgtgtgagtcaaacctccaaggtggaaatggtggaggaggtgttgctttctacaatcttggaatgaatatgaacaattttcaattctccgggggagatatttacggtatgagcggcggtagcggaggaggtggtggcggtgcgactagacccgcgtttgcggccgctgaagctcgaaaaacaaagaaaaaaatcaaagggattcagcaagccactgcaggagtctcacaagacacttcggaaaatcctaacaaaacaatagttcctgcagcattaccacagctcacccctaccttggtgtcactgctggaggtgattgaacccgaggtgttgtatgcaggatatgatagctctgttccagattcagcatggagaattatgaccacactcaacatgttaggtgggcgtcaagtgattgcagcagtgaaatgggcaaaggcgataccaggcttcagaaacttacacctggatgaccaaatgaccctgctacagtactcatggatgtttctcatggcatttgccctgggttggagatcatacagacaatcaagtggaaacctgctctgctttgctcctgatctgattattaatgagcagagaatgtctctaccctgcatgtatgaccaatgtaaacacatgctgtttgtctcctctgaattacaaagattgcaggtatcctatgaagagtatctctgtatgaaaaccttactgcttctctcctcagttcctaaggaaggtctgaagagccaagagttatttgatgagattcgaatgacttatatcaaagagctaggaaaagccatcgtcaaaagggaagggaactccagtcagaactggcaacggttttaccaactgacaaagcttctggactccatgcatgaggtggttgagaatctccttacctactgcttccagacatttttggataagaccatgagtattgaattcccagagatgttagctgaaatcatcactaatcagataccaaaatattcaaatggaaatatcaaaaagcttctgtttcatcaaaaatctagttacccatacgatgttcctgactatgcgggctatccctatgacgtcccggactatgcaggatcctatccatatgacgttccagattacgcttctagatacccatacgatgttcctgactatgcgggctatccctatgacgtcccggactatgcaggatcctatccatatgacgttccagattacgc

SEQ ID NO: 603 - DNA, 1797 bp, Artificial Sequence
  Artificial sequence
  P21211
aaatgaaccttgaagctcgaaaaacaaagaaaaaaatcaaagggattcagcaagccactgcaggagtctcacaagacacttcggaaaatcctaacaaaacaatagttcctgcagcattaccacagctcacccctaccttggtgtcactgctggaggtgattgaacccgaggtgttgtatgcaggatatgatagctctgttccagattcagcatggagaattatgaccacactcaacatgttaggtgggcgtcaagtgattgcagcagtgaaatgggcaaaggcgataccaggcttcagaaacttacacctggatgaccaaatgaccctgctacagtactcatggatgtttctcatggcatttgccctgggttggagatcatacagacaatcaagtggaaacctgctctgctttgctcctgatctgattattaatgagcagagaatgtctctaccctgcatgtatgaccaatgtaaacacatgctgtttgtctcctctgaattacaaagattgcaggtatcctatgaagagtatctctgtatgaaaaccttactgcttctctcctcagttcctaaggaaggtctgaagagccaagagttatttgatgagattcgaatgacttatatcaaagagctaggaaaagccatcgtcaaaagggaagggaactccagtcagaactggcaacggttttaccaactgacaaagcttctggactccatgcatgaggtggttgagaatctccttacctactgcttccagacatttttggataagaccatgagtattgaattcccagagatgttagctgaaatcatcactaatcagataccaaaatattcaaatggaaatatcaaaaagcttctgtttcatcaaaaaggtaccgtcgacgaacttaacagatctgaagcagacgaagcaaaggccgagaccactcccaccggtggagccaccagctcagccacagcctctggctcttcctccggacgtcgtccacgtggtcgtcctgcaggttccaaaaacaaacccaaacctccgacgattataactagagatagtcctaacgtccttagatcacacgttcttgaagtcacctccggttcggacatatccgaggcagtctccacctacgccactcgtcgcggctgcggcgtttgcattataagcggcacgggtgcggtcactaacgtcacgatacggcaacctgcggctccggctggtggaggtgtgattaccctgcatggtcggtttgacattttgtctttgaccggtactgcgcttccaccgcctgcaccaccgggagcaggaggtttgacggtgtatctagccggaggtcaaggacaagttgtaggagggaatgtggctggttcgttaattgcttcgggaccggtagtgttgatggctgcttcttttgcaaacgcagtttatgataggttaccgattgaagaggaagaaaccccaccgccgagaaccaccggggtgcagcagcagcagccggaggcgtctcagtcgtcggaggttacggggagtggggcccaggcgtgtgagtcaaacctccaaggtggaaatggtggaggaggtgttgctttctacaatcttggaatgaatatgaacaattttcaattctccgggggagatatttacggtatgagcggcggtagcggaggaggtggtggcggtgcgactagacccgcgttttagagttttagcgttttggtgacaccttttgttgcgtttgcgtgtttgacctcaaactactaggctactagctatagcggttgcgaaatgcgaatattaggtt

SEQ ID NO: 604 - DNA, 2115 bp, Artificial Sequence
  Artificial sequence
  P21286
atgaaccttgaagctcgaaaaacaaagaaaaaaatcaaagggattcagcaagccactgcaggagtctcacaagacacttcggaaaatcctaacaaaacaatagttcctgcagcattaccacagctcacccctaccttggtgtcactgctggaggtgattgaacccgaggtgttgtatgcaggatatgatagctctgttccagattcagcatggagaattatgaccacactcaacatgttaggtgggcgtcaagtgattgcagcagtgaaatgggcaaaggcgataccaggcttcagaaacttacacctggatgaccaaatgaccctgctacagtactcatggatgtttctcatggcatttgccctgggttggagatcatacagacaatcaagtggaaacctgctctgctttgctcctgatctgattattaatgagcagagaatgtctctaccctgcatgtatgaccaatgtaaacacatgctgtttgtctcctctgaattacaaagattgcaggtatcctatgaagagtatctctgtatgaaaaccttactgcttctctcctcagttcctaaggaaggtctgaagagccaagagttatttgatgagattcgaatgacttatatcaaagagctaggaaaagccatcgtcaaaagggaagggaactccagtcagaactggcaacggttttaccaactgacaaagcttctggactccatgcatgaggtggttgagaatctccttacctactgcttccagacatttttggataagaccatgagtattgaattcccagagatgttagctgaaatcatcactaatcagataccaaaatattcaaatggaaatatcaaaaagcttctgtttcatcaaaaaggtaccgtcgacgaacttaacagatctgaagcagacgaagcaaaggccgagaccactcccaccggtggagccaccagctcagccacagcctctggctcttcctccggacgtcgtccacgtggtcgtcctgcaggttccaaaaacaaacccaaacctccgacgattataactagagatagtcctaacgtccttagatcacacgttcttgaagtcacctccggttcggacatatccgaggcagtctccacctacgccactcgtcgcggctgcggcgtttgcattataagcggcacgggtgcggtcactaacgtcacgatacggcaacctgcggctccggctggtggaggtgtgattaccctgcatggtcggtttgacattttgtctttgaccggtactgcgcttccaccgcctgcaccaccgggagcaggaggtttgacggtgtatctagccggaggtcaaggacaagttgtaggagggaatgtggctggttcgttaattgcttcgggaccggtagtgttgatggctgcttcttttgcaaacgcagtttatgataggttaccgattgtagaggaagaaaccccaccgccgagaaccaccggggtgcagcagcagcagccggaggcgtctcagtcgtcggaggttacggggagtggggcccaggcgtgtgagtcaaacctccaaggtggaaatggtggaggaggtgttgctttctacaatcttggaatgaatatgaacaattttcaattctccgggggagatatttacggtatgagcggcggtagcggaggaggtggtggcggtgcgactagacccgcgttttgcggccgctctagttacccatacgatgttcctgactatgcgggctatccctatgacgtcccggactatgcaggatcctatccatatgacgttccagattacgcttctagatacccatacgatgttcctgactatgcgggctatccctatgacgtcccggactatgcaggatcctatccatatgacgttccagattacgctactagttacccatacgatgttcctgactatgcgggctatccctatgacgtcccggactatgcaggatcctatccatatgacgttccagattacgcttctagatacccatacgatgttcctgactatgcgggctatccctatgacgtcccggactatgcaggatcctatccatatgacgttccagattacgctactagacaggcctcgtaccggatcctctag

SEQ ID NO: 605 - DNA, 1855 bp, Artificial Sequence
  Artificial sequence
  P21117
gccggttcggacatatccgaggcagtctccacctacgccactcgtcgcggctgcggcgtttgcattataagcggcacgggtgcggtcactaacgtcacgatacggcaacctgcggctccggctggtggaggtgtgattaccctgcatggtcggtttgacattttgtctttgaccggtactgcgcttccaccgcctgcaccaccgggagcaggaggtttgacggtgtatctagccggaggtcaaggacaagttgtaggagggaatgtggctggttcgttaattgcttcgggaccggtagtgttgatggctgcttcttttgcaaacgcagtttatgataggttaccgattgaagaggaagaaaccccaccgccgagaaccaccggggtgcagcagcagcagccggaggcgtctcagtcgtcggaggttacggggagtggggcccaggcgtgtgagtcaaacctccaaggtggaaatggtggaggaggtgttgctttctacaatcttcgaattcggtagcccaattggtaaggaaataattattttcttttttccttttagtataaaatagttaagtgatgttaattagtatgattataataatatagttgttataattgtgaaaaaataatttataaatatattgtttacataaacaacatagtaatgtaaaaaaatatgacaagtgatgtgtaagacgaagaagataaaagttgagagtaagtatattatttttaatgaatttgatcgaacatgtaagatgatatactagcattaatatttgttttaatcataatagtaattctagctggtttgatgaattaaatatcaatgataaaatactatagtaaaaataagaataaataaattaaaataatatttttttatgattaatagtttattatataattaaatatctataccattactaaatattttagtttaaaagttaataaatattttgttagaaattccaatctgcttgtaatttatcaataaacaaaatattaaataacaagctaaagtaacaaataatatcaaactaatagaaacagtaatctaatgtaacaaaacataatctaatgctaatataacaaagcgcaagatctatcaattttatatagtattatttttcaatcaacattcttattaatttctaaataatacttgtagttttattaacttctaaatggattgactattaattaaatgaattagtcgaacatgaataaacaaggtaacatgatagatcatgtcattgtgttatcattgatcttacatttggattgattacagttgggaaattgggttcgaaatcgataagcttgcggccgctctagagaattcgaagattgtagaaagcaacacctcctccaccatttccaccttggaggtttgactcacacgcctgggccccactccccgtaacctccgacgactgagacgcctccggctgctgctgctgcaccccggtggttctcggcggtggggtttcttcctcttcaatcggtaacctatcataaactgcgtttgcaaaagaagcagccatcaacactaccggtcccgaagcaattaacgaaccagccacattccctcctacaacttgtccttgacctccggctagatacaccgtcaaacctcctgctcccggtggtgcaggcggtggaagcgcagtaccggtcaaagacaaaatgtcaaaccgaccatgcagggtaatcacacctccaccagccggagccgcaggttgccgtatcgtgacgttagtgaccgcacccgtgccgcttataatgcaaacgccgcagccgcgacgagtggcgtaggtggagactgcctcggatatgtccgaaccggcgtcgac

SEQ ID NO: 606 - DNA, 1045 bp, Artificial Sequence
  Artificial sequence
  P21160
ccgtccacgtggtcgtcctgcgggatccaagaacaagccgaagccaccggtgatagtgactagagatagccccaacgtgcttagatcacacgttcttgaagtcggaattcggtagcccaattggtaaggaaataattattttcttttttccttttagtataaaatagttaagtgatgttaattagtatgattataataatatagttgttataattgtgaaaaaataatttataaatatattgtttacataaacaacatagtaatgtaaaaaaatatgacaagtgatgtgtaagacgaagaagataaaagttgagagtaagtatattatttttaatgaatttgatcgaacatgtaagatgatatactagcattaatatttgttttaatcataatagtaattctagctggtttgatgaattaaatatcaatgataaaatactatagtaaaaataagaataaataaattaaaataatatttttttatgattaatagtttattatataattaaatatctataccattactaaatattttagtttaaaagttaataaatattttgttagaaattccaatctgcttgtaatttatcaataaacaaaatattaaataacaagctaaagtaacaaataatatcaaactaatagaaacagtaatctaatgtaacaaaacataatctaatgctaatataacaaagcgcaagatctatcattttatatagtattattttcaatcaacattcttattaatttctaaataatacttgtagttttattaacttctaaatggattgactattaattaaatgaattagtcgaacatgaataaacaaggtaacatgatagatcatgtcattgtgttatcattgatcttacatttggattgattacagttgggaaattgggttcgaaatcgataatcttgcggccgcgaattccgacttcaagaacgtgtgatctaagcacgttggggctatctctagtcactatcaccggtggcttcggcttgttcttggatcccgcaggacgaccacgtggacgggtcgac

SEQ ID NO: 607 - DNA, 1267 bp, Artificial Sequence
  Artificial sequence
  P21199
atgcccaattttaatcaaagtgggaatattgctgatagctcattgtccttcactttcactaacagtagcaacggtccgaacctcataacaactcaaacaaattctcaagcgctttcacaaccaattgcctcctctaacgttcatgataacttcatgaataatgaaatcacggctagtaaaattgatgatggtaataattcaaaaccactgtcacctggttggacggaccaaactgcgtataacgcgtttggaatcactacagggatgtttaataccactacaatggatgatgtatataactatctattcgatgatgaagataccccaccaaacccaaaaaaagagggtaccgtcgacgaacttaacagatctgaagcagacgaagcaaaggccgagaccactcccaccggtggagccaccagctcagccacagcctctggctcttcctccggacgtcgtccacgtggtcgtcctgcaggttccaaaaacaaacccaaacctccgacgattataactagagatagtcctaacgtccttagatcacacgttcttgaagtcacctccggttcggacatatccgaggcagtctccacctacgccactcgtcgcggctgcggcgtttgcattataagcggcacgggtgcggtcactaacgtcacgatacggcaacctgcggctccggctggtggaggtgtgattaccctgcatggtcggtttgacattttgtctttgaccggtactgcgcttccaccgcctgcaccaccgggagcaggaggtttgacggtgtatctagccggaggtcaaggacaagttgtaggagggaatgtggctggttcgttaattgcttcgggaccggtagtgttgatggctgcttcttttgcaaacgcagtttatgataggttaccgattgaagaggaagaaaccccaccgccgagaaccaccggggtgcagcagcagcagccggaggcgtctcagtcgtcggaggttacggggagtggggcccaggcgtgtgagtcaaacctccaaggtggaaatggtggaggaggtgttgctttctacaatcttggaatgaatatgaacaattttcaattctccgggggagatatttacggtatgagcggcggtagcggaggaggtggtggcggtgcgactagacccgcgttttagagttttagcgttttggtgacaccttttgtcgcgtttgcgtgtttgacctcaaactactaggctactagctatagcggttgcgaaatgcgaatattaggtt

SEQ ID NO: 608 - DNA, 1554 bp, Artificial Sequence
  Artificial sequence
  P25263
atggaacttaacagatctgaagcagacgaagcaaaggccgagaccactcccaccggtggagccaccagctcagccacagcctctggctcttcctccggacgtcgtccacgtggtcgtcctgcaggttccaaaaacaaacccaaacctccgacgattataactagagatagtcctaacgtccttagatcacacgttcttgaagtcacctccggttcggacatatccgaggcagtctccacctacgccactcgtcgcggctgcggcgtttgcattataagcggcacgggtgcggtcactaacgtcacgatacggcaacctgcggctccggctggtggaggtgtgattaccctgcatggtcggtttgacattttgtctttgaccggtactgcgcttccaccgcctgcaccaccgggagcaggaggtttgacggtgtatctagccggaggtcaaggacaagttgtaggagggaatgtggctggttcgttaattgcttcgggaccggtagtgttgatggctgcttcttttgcaaacgcagtttatgataggttaccgattgaagaggaagaaaccccaccgccgagaaccaccggggtgcagcagcagcagccggaggcgtctcagtcgtcggaggttacggggagtggggcccaggcgtgtgagtcaaacctccaaggtggaaatggtggaggaggtgttgctttctacaatcttggaatgaatatgaacaattttcaattctccgggggagatatttacggtatgagcggcggtagcggaggaggtggtggcggtgcgactagacccgcgttttgcggccgcatggtgagcaagggcgaggagctgttcaccggggtggtgcccatcctggtcgagctggacggcgacgtaaacggccacaagttcagcgtgtccggcgagggcgagggcgatgccacctacggcaagctgaccctgaagttcatctgcaccaccggcaagctgcccgtgccctggcccaccctcgtgaccaccctgacctacggcgtgcagtgcttcagccgctaccccgaccacatgaagcagcacgacttcttcaagtccgccatgcccgaaggctacgtccaggagcgcaccatcttcttcaaggacgacggcaactacaagacccgcgccgaggtgaagttcgagggcgacaccctggtgaaccgcatcgagctgaagggcatcgacttcaaggaggacggcaacatcctggggcacaagctggagtacaactacaacagccacaacgtctatatcatggccgacaagcagaagaacggcatcaaggtgaacttcaagatccgccacaacatcgaggacggcagcgtgcagctcgccgaccactaccagcagaacacccccatcggcgacggccccgtgctgctgcccgacaaccactacctgagcacccagtccgccctgagcaaagaccccaacgagaagcgcgatcacatggtcctgctggagttcgtgaccgccgccgggatcactctcggcatggacgagctgtacaagtccggagggatcctctag

SEQ ID NO: 609 - DNA, 965 bp, Artificial Sequence
  Artificial sequence
  P448
ctgcctctacagagacctgaagattccagaaccccacctgatcaaaaataacatggaacttaacagatctgaagcagacgaagcaaaggccgagaccactcccaccggtggagccaccagctcagccacagcctctggctcttcctccggacgtcgtccacgtggtcgtcctgcaggttccaaaaacaaacccaaacctccgacgattataactagagatagtcctaacgtccttagatcacacgttcttgaagtcacctccggttcggacatatccgaggcagtctccacctacgccactcgtcgcggctgcggcgtttgcattataagcggcacgggtgcggtcactaacgtcacgatacggcaacctgcggctccggctggtggaggtgtgattaccctgcatggtcggtttgacattttgtctttgaccggtactgcgcttccaccgcctgcaccaccgggagcaggaggtttgacggtgtatctagccggaggtcaaggacaagttgtaggagggaatgtggctggttcgttaattgcttcgggaccggtagtgttgatggctgcttcttttgcaaacgcagtttatgataggttaccgattgaagaggaagaaaccccaccgccgagaaccaccggggtgcagcagcagcagccggaggcgtctcagtcgtcggaggttacggggagtggggcccaggcgtgtgagtcaaacctccaaggtggaaatggtggaggaggtgttgctttctacaatcttggaatgaatatgaacaattttcaattctccgggggagatatttacggtatgagcggcggtagcggaggaggtggtggcggtgcgactagacccgcgttttagagttttagcgttttggtgacaccttttgttgcgtttgcgtgtttgacctcaaactactaggctactagctatagcggttgcgaaatgcgaatattaggtt

SEQ ID NO: 610 - DNA, 1208 bp, Artificial Sequence
  Artificial sequence
  P21145
tacagagacctgaagattccagaaccccacctgatcaaaataacatggaacttaacagatctgaagcagacgaagcaaaggccgagaccactcccaccggtggagccaccagctcagccacagcctctggctcttcctccggacgtcgtccacgtggtcgtcctgcaggttccaaaaacaaacccaaacctccgacgattataactagagatagtcctaacgtccttagatcacacgttcttgaagtcacctccggttcggacatatccgaggcagtctccacctacgccactcgtcgcggctgcggcgtttgcattataagcggcacgggtgcggtcactaacgtcacgatacggcaacctgcggctccggctggtggaggtgtgattaccctgcatggtcggtttgacattttgtctttgaccggtactgcgcttccaccgcctgcaccaccgggagcaggaggtttgacggtgtatctagccggaggtcaaggacaagttgtaggagggaatgtggctggttcgttaattgcttcgggaccggtagtgttgatggctgcttcttttgcaaacgcagtttatgataggttaccgattgaagaggaagaaaccccaccgccgagaaccaccggggtgcagcagcagcagccggaggcgtctcagtcgtcggaggttacggggagtggggcccaggcgtgtgagtcaaacctccaaggtggaaatggtggaggaggtgttgctttctacaatcttggaatgaatatgaacaattttcaattctccgggggagatatttacggtatgagcggcggtagcggaggaggtggtggcggtgcgactagacccgcgtttgaattccccaattttaatcaaagtgggaatattgctgatagctcattgtccttcactttcactaacagtagcaacggtccgaacctcataacaactcaaacaaattctcaagcgctttcacaaccaattgcctcctctaacgttcatgataacttcatgaataatgaaatcacggctagtaaaattgatgatggtaataattcaaaaccactgtcacctggttggacggaccaaactgcgtataacgcgtttggaatcactacagggatgtttaataccactacaatggatgatgtatataactatctattcgatgatgaagataccccaccaaacccaaaaaaagagtagtaa

SEQ ID NO: 611 - DNA, 1048 bp, Artificial Sequence
  Artificial sequence
  P25703
ttttgtctttgtctctcactagctataaccaaaaaaaaatccaaaaacccaaaccacagtttcttgtttttgttatcaatgtctagttatatgcaccctcttctagggcaagaactgcatctacagagacctgaagattccagaaccccacctgatcaaaataacatggaacttaacagatctgaagcagacgaagcaaaggccgagaccactcccaccggtggagccaccagctcagccacagcctctggctcttcctccggacgtcgtccacgtggtcgtcctgcaggttccaaaaacaaacccaaacctccgacgattataactagagatagtcctaacgtccttagatcacacgttcttgaagtcacctccggttcggacatatccgaggcagtctccacctacgccactcgtcgcggctgcggcgtttgcattataagcggcacgggtgcggtcactaacgtcacgatacggcaacctgcggctccggctggtggaggtgtgattaccctgcatggtcggtttgacattttgtctttgaccggtactgcgcttccaccgcctgcaccaccgggagcaggaggtttgacggtgtatctagccggaggtcaaggacaagttgtaggagggaatgtggctggttcgttaattgcttcgggaccggtagtgttgatggctgcttcttttgcaaacgcagtttatgataggttaccgattgaagaggaagaaaccccaccgccgagaaccaccggggtgcagcagcagcagccggaggcgtctcagtcgtcggaggttacggggagtggggcccaggcgtgtgagtcaaacctccaaggtggaaatggtggaggaggtgttgctttctacaatcttggaatgaatatgaacaattttcaattctccgggggagatatttacggtatgagcggcggtagcggaggaggtggtggcggtgcgactagacccgcgttttagagttttagcgttttggtgacaccttttgttgcgtttgcgtgtttgacctcaaactactaggctacctata

SEQ ID NO: 612 - DNA, 144 bp, Artificial Sequence
  Artificial sequence
  P21271
tcgaccagctcagccatggcctctggctcttcctccggacgtcgtccacgtggtcgtcctgcaggttccaaaaacaaacccaaacctccgacgattataactagagatagtcctaacgtccttagatgacacgttcttgaaggc

SEQ ID NO: 613 - DNA, 463 bp, Artificial Sequence
  Artificial sequence
  P21272
tcgaccagctcagccatggcctctggctcttcctccggacgtcgtccacgtggtcgtcctgcaggttccaaaaacaaacccaaacctccgacgattataactagagatagtcctaacgtccttagatcacacgttcttgaagtcacctccggttcggacatatccgaggcagtctccacctacgccactcgtcgcggctgcggcgtttgcattataagcggcacgggtgcggtcactaacgtcacgatacggcaacctgcggctccggctggtggaggtgtgattaccctgcatggtcggtttgacattttgtctttgaccggtactgcgcttccaccgcctgcaccaccgggagcaggaggtttgacggtgtatctagccggaggtcaaggacaagttgtaggagggaatgtggctggttcgttaattgcttcgggaccggtagtgtagatggctgcttcgc

SEQ ID NO: 614 - DNA, 973 bp, Artificial Sequence
  Artificial sequence
  P3369
ggcaagaactgcatctacagagacctgaagattccagaaccccacctgatcaaaaataacatggaacttaacagatctgaagcagacgaagcaaaggccgagaccactcccaccggtggagccaccagctcagccacagcctctggctcttcctccggacgtcgtccacgtggtcgtcctgcaggttccaaaaacaaacccaaacctccgacgattataactagagatagtcctaacgtccttagatcacacgttcttgaagtcacctccggttcggacatatccgaggcagtctccacctacgccactcgtcgcggctgcggcgtttgcattataagcggcacgggtgcggtcactaacgtcacgatacggcaacctgcggctccggctggtggaggtgtgattaccctgcatggtcggtttgacattttgtctttgaccggtactgcgcttccaccgcctgcaccaccgggagcaggaggtttgacggtgtatctagccggaggtcaaggacaagttgtaggagggaatgtggctggttcgttaattgcttcgggaccggtagtgttgatggctgcttcttttgcaaacgcagtttatgataggttaccgattgaagaggaagaaaccccaccgccgagaaccaccggggtgcagcagcagcagccggaggcgtctcagtcgtcggaggttacggggagtggggcccaggcgtgtgagtcaaacctccaaggtggaaatggtggaggaggtgttgctttctacaatcttggaatgaatatgaacaattttcaattctccgggggagatatttacggtatgagcggcggtagcggaggaggtggtggcggtgcgactagacccgcgttttagagttttagcgttttggtgacaccttttgttgcgtttgcgtgtttgacctcaaactactaggctactagctatagcggttgcgaaatgcgaatattaggtt

SEQ ID NO: 615 - DNA, 1433 bp, Artificial Sequence
  Artificial sequence
  P25267
tacagagacctgaagattccagaaccccacctgatcaaaataacatggaacttaacagatctgaagcagacgaagcaaaggccgagaccactcccaccggtggagccaccagctcagccacagcctctggctcttcctccggacgtcgtccacgtggtcgtcctgcaggttccaaaaacaaacccaaacctccgacgattataactagagatagtcctaacgtccttagatcacacgttcttgaagtcacctccggttcggacatatccgaggcagtctccacctacgccactcgtcgcggctgcggcgtttgcattataagcggcacgggtgcggtcactaacgtcacgatacggcaacctgcggctccggctggtggaggtgtgattaccctgcatggtcggtttgacattttgtctttgaccggtactgcgcttccaccgcctgcaccaccgggagcaggaggtttgacggtgtatctagccggaggtcaaggacaagttgtaggagggaatgtggctggttcgttaattgcttcgggaccggtagtgttgatggctgcttcttttgcaaacgcagtttatgataggttaccgattgaagaggaagaaaccccaccgccgagaaccaccggggtgcagcagcagcagccggaggcgtctcagtcgtcggaggttacggggagtggggcccaggcgtgtgagtcaaacctccaaggtggaaatggtggaggaggtgttgctttctacaatcttggaatgaatatgaacaattttcaattctccgggggagatatttacggtatgagcggcggtagcggaggaggtggtggcggtgcgactagacccgcgtttgcggccgctgccgctgcggcagcggccatggaaaagagaagatggaaaaagaatttcatagccgtctcagcagccaaccgctttaagaaaatctcatcctccggggcacttgattatgatattccaactactgctagcgagaatttgtattttcagggtgagctcaaaaccgcggctcttgcgcaacacgatgaagccgtggacaacaaattcaacaaagaacaacaaaacgcgttctatgagatcttacatttacctaacttaaacgaagaacaacgaaacgccttcatccaaagtttaaaagatgacccaagccaaagcgctaaccttttagcagaagctaaaaagctaaatgatgctcaggcgccgaaagtagacaacaaattcaacaaagaacaacaaaacgcgttctatgagatcttacatttacctaacttaaacgaagaacaacgaaacgccttcatccaaagtttaaaagatgacccaagccaaagcgctaaccttttagcagaagctaaaaagctaaatggtgctcaggcgccgaaagtagacgcgaattccgcggggaagtcaacctga

SEQ ID NO: 616 - DNA, 1295 bp, Artificial Sequence
  Artificial sequence
  P25265
tacagagacctgaagattccagaaccccacctgatcaaaataacatggaacttaacagatctgaagcagacgaagcaaaggccgagaccactcccaccggtggagccaccagctcagccacagcctctggctcttcctccggacgtcgtccacgtggtcgtcctgcaggttccaaaaacaaacccaaacctccgacgattataactagagatagtcctaacgtccttagatcacacgttcttgaagtcacctccggttcggacatatccgaggcagtctccacctacgccactcgtcgcggctgcggcgtttgcattataagcggcacgggtgcggtcactaacgtcacgatacggcaacctgcggctccggctggtggaggtgtgattaccctgcatggtcggtttgacattttgtctttgaccggtactgcgcttccaccgcctgcaccaccgggagcaggaggtttgacggtgtatctagccggaggtcaaggacaagttgtaggagggaatgtggctggttcgttaattgcttcgggaccggtagtgttgatggctgcttcttttgcaaacgcagtttatgataggttaccgattgaagaggaagaaaccccaccgccgagaaccaccggggtgcagcagcagcagccggaggcgtctcagtcgtcggaggttacggggagtggggcccaggcgtgtgagtcaaacctccaaggtggaaatggtggaggaggtgttgctttctacaatcttggaatgaatatgaacaattttcaattctccgggggagatatttacggtatgagcggcggtagcggaggaggtggtggcggtgcgactagacccgcgtttgcggccgcggctgccgccgcagccgctgctagttacccatacgatgttcctgactatgcgggctatccctatgacgtcccggactatgcaggatcctatccatatgacgttccggattacgcttctagatacccatacgatgttcctgactatgcgggctatccctatgacgtcccggactatgcaggatcctatccatatgacgttccagattacgctactagttacccatacgatgttcctgactatgcgggctatccctatgacgtcccggactatgcaggatcctatccatatgacgttccagattacgcttctagatacccatacgatgttcctgactatgcgggctatccctatgacgtcccggactatgcaggatcctatccatatgacgttccagattacgctactagacaggcctcgtaccagatcctctag

SEQ ID NO: 617 - DNA, 1624 bp, Artificial Sequence
  Artificial sequence
  P21168
aatacatcgtgaaaatccctaagaactgttgaaatgtgtctttacgctaagtaacaaaaactaagaagccatattaagatgcatgtccatccattagtcgttgaaatcgaattagtattattggcaagcatgtgcataaaattaattcagcttactttgtttgtaacataaaacacgccccctctgtaaagttttagcaattttgatattagaacattataaaataaaaaaagccaagccatgtcttgagtggctcgagaaatctaaaagtttaaactaaaaaagaaataggaagaaagcaaagtgctcatcatgtgaaaatgtgaaatccaccactcttttcacaaataacagccatgaagccccattcattgtcttcctctactcattacacacacaaattctttttgagctttactcgtccgatcacttcatcaccactcaaaagaaaatattcgaaagtaatccatatgagtttatatatcagcatgattaactaggagagaacaaaattatttccagttcattgtctaaaatcaaagttttaggtgggaaaataactactactcctatgttttgatctttaataaaagatcttgaatgaccaaaactatttttagttttttttcagcaattggttcttgtcatgttaattaaacacacatgatttatatatctatagactcatggtaagagcaaatgctagtattttaaaacttccgatcttaattttgtaaaaatactaaaatgtaatagtttgaacttaaaaataaataaaaagaggacaatcgttatgttatttaccgacaaaaaacactaacagatagtttggtcggttatagttcttgaaatcaaacagcgtaacttgactttggaataacaatttacattcgctttgttttctttttttgctttaagattagaaaacaaaacaaatctacaatcatcatatcaccatcacaaaaccatcccttcaccgtcacaaaaggcctctcctttaacttctctatctccgtgatttacttctccagaatccttcttttgtctcccgcagaatccatcagtcccttcttaggtcgtcaacatcttaatttagtttttttgcttcactcgaggaaaagtcactacaccaacccaacatattattatatggatacacaaatatatttgtattatttatatttatatgtaccttattatagtttagaagagagctgtgttttgtgatgctcttgctttacttctttctctcctttgtttcattccatttcacatgaagatctagatctgggtccagacaaatttcaccgacccagctctttcacatatgtagacctctctctctctaattattcagtaaggttttgttctctcttgtcgtcttcttgttttgtccgtagcattattaataatcaaactcagtctctgaaatactctcagtgacaaaccacttctgtcgacttttgtctttgtctctcactagctataaccaaaaaaatccaaaaacccaaaccacagtttcttgtttttgttatcaatgtctagttatatgcaccctcttctagggcaagaactgcatctacagagacctgaagattccagaaccccacctgatcaaaataac

SEQ ID NO: 618 - DNA, 1624 bp, Artificial Sequence; identical to SEQ ID NO: 617
  Artificial sequence
  P25104

SEQ ID NO: 619 - DNA, 980 bp, Artificial Sequence
  Artificial sequence
  P21521
tcgaccccccgacctgcctctacagagacctgaagattccagaaccccacctgatcaaaaataacatggaacttaacagatctgaagcagacgaagcaaaggccgagaccactcccaccggtggagccaccagctcagccacagcctctggctcttcctccggacgtcgtccacgtggtcgtcctgcaggttccaaaaacaaacccaaacctccgacgattataactagagatagtcctaacgtccttagatcacacgttcttgaagtcacctccggttcggacatatccgaggcagtctccacctacgccactcgtcgcggctgcggcgtttgcattataagcggcacgggtgcggtcactaacgtcacgatacggcaacctgcggctccggctggtggaggtgtgattaccctgcatggtcggtttgacattttgtctttgaccggtactgcgcttccaccgcctgcaccaccgggagcaggaggtttgacggtgtatctagccggaggtcaaggacaagttgtaggagggaatgtggctggttcgttaattgcttcgggaccggtagtgttgatggctgcttcttttgcaaacgcagtttatgataggttaccgattgaagaggaagaaaccccaccgccgagaaccaccggggtgcagcagcagcagccggaggcgtctcagtcgtcggaggttacggggagtggggcccaggcgtgtgagtcaaacctccaaggtggaaatggtggaggaggtgttgctttctacaatcttggaatgaatatgaacaattttcaattctccgggggagatatttacggtatgagcggcggtagcggaggaggtggtggcggtgcgactagacccgcgttttagagttttagcgttttggtgacaccttttgttgcgtttgcgtgtttgacctcaaactactaggctactagctatagcggttgcgaaatgcgaatattaggttgc

SEQ ID NO: 620 - DNA, 925 bp, Artificial Sequence
  Artificial sequence
  P467
cgtagtgtctattgaaaccagagaaaagccaaaggggatgcaaccaacatccgtcggtagtagcggcggtggtgacgacggaggaggcagaggaggaggaggagggctaagtagaagtggactatctcggatccgttcagctccagcgacttggcttgaagctttacttgaggaagatgaagaagagtctttgaaacctaatcttggtctcaccgatttgcttaccgggaactcgaacgatttaccgacaagtcgcggctcgttcgagttcccgattcctgttgagcaagggttgtatcaacaaggtgggtttcaccgacagaatagtactccggcggattttcttagtggttctgatggatttatccaaagctttgggattcaggcgaattacgattacttatcggggaatatcgatgtttctccgggaagtaagcggtctagagaaatggaagcactcttctcttctcctgagtttacttctcaaatgaaaggagagcaaagcagcggtcaagttcctaccggagtatcaagcatgtcggatatgaacatggagaaccttatggaggactctgttgcttttagggttcgggctaaacgtggttgcgcaactcatccccgcagcattgccgagagggtacgaaggacgcggattagtgatcggataaggaagctacaagagcttgtacctaacatggacaagcaaaccaacactgcagacatgttagaagaagcagtagaatacgtgaaagttcttcaaaggcagatccaggagttaacagaagaacagaagaggtgcacatgcatacctaaggaagaacaataaggtttgctcctgatttgttttatatttgcttaacggcaatgatctgatcgaaaaattcgaaagatgatcttagcttgaatttagatggatgtcatgttg

SEQ ID NO: 621 - DNA, 626 bp, Artificial Sequence
  Artificial sequence
  P1446
catcattcgttgttgtgaatcatactgaaacgaacccctcaccaaacaagatttatagatcctctgctttaattataagattctgatggcggggaattatcattcgttccaaaatccaatccctcgataccagaattacaacttcgggagcagctcatctaatcatcaacatgaacatgatgggttagtggtggtggtggaggatcaacagcaagaagaaagcatgatggtaaaagaacaagacaggctacttccgatagcaaacgtaggaaggatcatgaagaacatcctcccagcaaacgcaaaggtctctaaagaagccaaagagactatgcaagaatgtgtgtccgagttcattagcttcgtcacgggagaagcatccgataaatgccacaaggagaagcgaaagaccgttaatggagacgatatctgttgggctatggctaatctagggtttgatgattacgccgcccagctcaagaagtacttacatcgttaccgagttctcgaaggtgagaaacctaatcatcacggcaaaggaggacctaaatcctcgccagataattaaaattcttccatcgctttttgattttccttgattaatctccatgtcatcatcttcctct

SEQ ID NO: 622 - DNA, 1227 bp, Artificial Sequence
  Artificial sequence
  P26045
atggcggggaattatcattcgttccaaaatccaatccctcgataccagaattacaacttcgggagcagctcatctaatcatcaacatgaacatgatgggttagtggtggtggtggaggatcaacagcaagaagaaagcatgatggtaaaagaacaagacaggctacttccgatagcaaacgtaggaaggatcatgaagaacatcctcccagcaaacgcaaaggtctctaaagaagccaaagagactatgcaagaatgtgtgtccgagttcattagcttcgtcacgggagaagcatccgataaatgccacaaggagaagcgaaagaccgttaatggagacgatatctgttgggctatggctaatctagggtttgatgattacgccgcccagctcaagaagtacttacatcgttaccgagttctcgaaggtgagaaacctaatcatcacggcaaaggaggacctaaatcctcgccagataatgcggccgctgccgctgcggcagcggccatggtgagcaagggcgaggagctgttcaccggggtggtgcccatcctggtcgagctggacggcgacgtaaacggccacaagttcagcgtgtccggcgagggcgagggcgatgccacctacggcaagctgaccctgaagttcatctgcaccaccggcaagctgcccgtgccctggcccaccctcgtgaccaccctgacctggggcgtgcagtgcttcagccgctaccccgaccacatgaagcagcacgacttcttcaagtccgccatgcccgaaggctacgtccaggagcgcaccatcttcttcaaggacgacggcaactacaagacccgcgccgaggtgaagttcgagggcgacaccctggtgaaccgcatcgagctgaagggcatcgacttcaaggaggacggcaacatcctggggcacaagctggagtacaactacatcagccacaacgtctatatcaccgccgacaagcagaagaacggcatcaaggccaacttcaagatccgccacaacatcgaggacggcagcgtgcagctcgccgaccactaccagcagaacacccccatcggcgacggccccgtgctgctgcccgacaaccactacctgagcacccagtccgccctgagcaaagaccccaacgagaagcgcgatcacatggtcctgctggagttcgtgaccgccgccgggatcactctcggcatggacgagctgtacaagtaa

SEQ ID NO: 623 - DNA, 859 bp, Artificial Sequence; identical to SEQ ID NO: 253
  Artificial sequence
  P483

SEQ ID NO: 624 - DNA, 859 bp, Artificial Sequence; identical to SEQ ID NO: 253
  Artificial sequence
  P7154

SEQ ID NO: 625 - DNA, 1485 bp, Artificial Sequence
  Artificial sequence
  P25203
atgaatatctctcaaaaccctagccctaattttacgtacttctccgatgaaaactttattaatccgtttatggataacaacgatttctcaaatttgatgttctttgacatagatgaaggaggtaacaatggattaatcgaggaagagatctcatctccgacaagcatcgtttcgtcggagacatttaccggggaaagcggcggatccggcagcgcaacaacgttgagtaaaaaggaatcaactaatagaggaagtaaagagagtgatcagacgaaggagacgggtcatcgagttgcatttagaacgagatcgaagattgatgtgatggatgatggttttaaatggaggaagtatggcaagaaatctgtcaaaaacaacattaacaagaggaattactacaaatgctcaagtgaaggttgctcggtgaagaagagggtagagagagatggtgacgatgcagcttatgtaattacaacatatgaaggagtccataaccatgagagtctctctaatgtctattacaatgaaatggttttatcttatgatcatgataactggaaccaacactctcttcttcgatctgcggccgctgaagctcgaaaaacaaagaaaaaaatcaaagggattcagcaagccactgcaggagtctcacaagacacttcggaaaatcctaacaaaacaatagttcctgcagcattaccacagctcacccctaccttggtgtcactgctggaggtgattgaacccgaggtgttgtatgcaggatatgatagctctgttccagattcagcatggagaattatgaccacactcaacatgttaggtgggcgtcaagtgattgcagcagtgaaatgggcaaaggcgataccaggcttcagaaacttacacctggatgaccaaatgaccctgctacagtactcatggatgtttctcatggcatttgccctgggttggagatcatacagacaatcaagtggaaacctgctctgctttgctcctgatctgattattaatgagcagagaatgtctctaccctgcatgtatgaccaatgtaaacacatgctgtttgtctcctctgaattacaaagattgcaggtatcctatgaagagtatctctgtatgaaaaccttactgcttctctcctcagttcctaaggaaggtctgaagagccaagagttatttgatgagattcgaatgacttatatcaaagagctaggaaaagccatcgtcaaaagggaagggaactccagtcagaactggcaacggttttaccaactgacaaagcttctggactccatgcatgaggtggttgagaatctccttacctactgcttccagacatttttggataagaccatgagtattgaattcccagagatgttagctgaaatcatcactaatcagataccaaaatattcaaatggaaatatcaaaaagcttctgtttcatcaaaaatctagacaggcctcgtaccggatcctctag

SEQ ID NO: 626 - DNA, 1478 bp, Artificial Sequence
  Artificial sequence
  P25221
atgaaccttgaagctcgaaaaacaaagaaaaaaatcaaagggattcagcaagccactgcaggagtctcacaagacacttcggaaaatcctaacaaaacaatagttcctgcagcattaccacagctcacccctaccttggtgtcactgctggaggtgattgaacccgaggtgttgtatgcaggatatgatagctctgttccagattcagcatggagaattatgaccacactcaacatgttaggtgggcgtcaagtgattgcagcagtgaaatgggcaaaggcgataccaggcttcagaaacttacacctggatgaccaaatgaccctgctacagtactcatggatgtttctcatggcatttgccctgggttggagatcatacagacaatcaagtggaaacctgctctgctttgctcctgatctgattattaatgagcagagaatgtctctaccctgcatgtatgaccaatgtaaacacatgctgtttgtctcctctgaattacaaagattgcaggtatcctatgaagagtatctctgtatgaaaaccttactgcttctctcctcagttcctaaggaaggtctgaagagccaagagttatttgatgagattcgaatgacttatatcaaagagctaggaaaagccatcgtcaaaagggaagggaactccagtcagaactggcaacggttttaccaactgacaaagcttctggactccatgcatgaggtggttgagaatctccttacctactgcttccagacatttttggataagaccatgagtattgaattcccagagatgttagctgaaatcatcactaatcagataccaaaatattcaaatggaaatatcaaaaagcttctgtttcatcaaaaaggtaccgtcgacatgaatatctctcaaaaccctagccctaattttacgtacttctccgatgaaaactttattaatccgtttatggataacaacgatttctcaaatttgatgttctttgacatagatgaaggaggtaacaatggattaatcgaggaagagatctcatctccgacaagcatcgtttcgtcggagacatttaccggggaaagcggcggatccggcagcgcaacaacgttgagtaaaaaggaatcaactaatagaggaagtaaagagagtgatcagacgaaggagacgggtcatcgagttgcatttagaacgagatcgaagattgatgtgatggatgatggttttaaatggaggaagtatggcaagaaatctgtcaaaaacaacattaacaagaggaattactacaaatgctcaagtgaaggttgctcggtgaagaagagggtagagagagatggtgacgatgcagcttatgtaattacaacatatgaaggagtccataaccatgagagtctctctaatgtctattacaatgaaatggttttatcttatgatcatgataactggaaccaacactctcttcttcgatcttaagcggccgc

SEQ ID NO: 627 - DNA, 936 bp, Artificial Sequence
  Artificial sequence
  P25659
atgcccaattttaatcaaagtgggaatattgctgatagctcattgtccttcactttcactaacagtagcaacggtccgaacctcataacaactcaaacaaattctcaagcgctttcacaaccaattgcctcctctaacgttcatgataacttcatgaataatgaaatcacggctagtaaaattgatgatggtaataattcaaaaccactgtcacctggttggacggaccaaactgcgtataacgcgtttggaatcactacagggatgtttaataccactacaatggatgatgtatataactatctattcgatgatgaagataccccaccaaacccaaaaaaagagggtaccatgaatatctctcaaaaccctagccctaattttacgtacttctccgatgaaaactttattaatccgtttatggataacaacgatttctcaaatttgatgttctttgacatagatgaaggaggtaacaatggattaatcgaggaagagatctcatctccgacaagcatcgtttcgtcggagacatttaccggggaaagcggcggatccggcagcgcaacaacgttgagtaaaaaggaatcaactaatagaggaagtaaagagagtgatcagacgaaggagacgggtcatcgagttgcatttagaacgagatcgaagattgatgtgatggatgatggttttaaatggaggaagtatggcaagaaatctgtcaaaaacaacattaacaagaggaattactacaaatgctcaagtgaaggttgctcggtgaagaagagggtagagagagatggtgacgatgcagcttatgtaattacaacatatgaaggagtccataaccatgagagtctctctaatgtctattacaatgaaatggttttatcttatgatcatgataactggaaccaacactctcttcttcgatcttaa

SEQ ID NO: 628 - DNA, 936 bp, Artificial Sequence
  Artificial sequence
  P25658
atgaatatctctcaaaaccctagccctaattttacgtacttctccgatgaaaactttattaatccgtttatggataacaacgatttctcaaatttgatgttctttgacatagatgaaggaggtaacaatggattaatcgaggaagagatctcatctccgacaagcatcgtttcgtcggagacatttaccggggaaagcggcggatccggcagcgcaacaacgttgagtaaaaaggaatcaactaatagaggaagtaaagagagtgatcagacgaaggagacgggtcatcgagttgcatttagaacgagatcgaagattgatgtgatggatgatggttttaaatggaggaagtatggcaagaaatctgtcaaaaacaacattaacaagaggaattactacaaatgctcaagtgaaggttgctcggtgaagaagagggtagagagagatggtgacgatgcagcttatgtaattacaacatatgaaggagtccataaccatgagagtctctctaatgtctattacaatgaaatggttttatcttatgatcatgataactggaaccaacactctcttcttcgatcttgcggccgccccaattttaatcaaagtgggaatattgctgatagctcattgtccttcactttcactaacagtagcaacggtccgaacctcataacaactcaaacaaattctcaagcgctttcacaaccaattgcctcctctaacgttcatgataacttcatgaataatgaaatcacggctagtaaaattgatgatggtaataattcaaaaccactgtcacctggttggacggaccaaactgcgtataacgcgtttggaatcactacagggatgtttaataccactacaatggatgatgtatataactatctattcgatgatgaagataccccaccaaacccaaaaaaagagtag

SEQ ID NO: 629 - DNA, 1326 bp, Artificial Sequence
  Artificial sequence
  P25269
atgaatatctctcaaaaccctagccctaattttacgtacttctccgatgaaaactttattaatccgtttatggataacaacgatttctcaaatttgatgttctttgacatagatgaaggaggtaacaatggattaatcgaggaagagatctcatctccgacaagcatcgtttcgtcggagacatttaccggggaaagcggcggatccggcagcgcaacaacgttgagtaaaaaggaatcaactaatagaggaagtaaagagagtgatcagacgaaggagacgggtcatcgagttgcatttagaacgagatcgaagattgatgtgatggatgatggttttaaatggaggaagtatggcaagaaatctgtcaaaaacaacattaacaagaggaattactacaaatgctcaagtgaaggttgctcggtgaagaagagggtagagagagatggtgacgatgcagcttatgtaattacaacatatgaaggagtccataaccatgagagtctctctaatgtctattacaatgaaatggttttatcttatgatcatgataactggaaccaacactctcttcttcgatcttgcggccgcatggtgagcaagggcgaggagctgttcaccggggtggtgcccatcctggtcgagctggacggcgacgtaaacggccacaagttcagcgtgtccggcgagggcgagggcgatgccacctacggcaagctgaccctgaagttcatctgcaccaccggcaagctgcccgtgccctggcccaccctcgtgaccaccctgacctacggcgtgcagtgcttcagccgctaccccgaccacatgaagcagcacgacttcttcaagtccgccatgcccgaaggctacgtccaggagcgcaccatcttcttcaaggacgacggcaactacaagacccgcgccgaggtgaagttcgagggcgacaccctggtgaaccgcatcgagctgaagggcatcgacttcaaggaggacggcaacatcctggggcacaagctggagtacaactacaacagccacaacgtctatatcatggccgacaagcagaagaacggcatcaaggtgaacttcaagatccgccacaacatcgaggacggcagcgtgcagctcgccgaccactaccagcagaacacccccatcggcgacggccccgtgctgctgcccgacaaccactacctgagcacccagtccgccctgagcaaagaccccaacgagaagcgcgatcacatggtcctgctggagttcgtgaccgccgccgggatcactctcggcatggacgagctgtacaagtccggagggatcctctag

SEQ ID NO: 630 - DNA, 713 bp, Artificial Sequence
  Artificial sequence
  P15038
tcttcacttctctagttcttggatgctttaaacctctctctctctctctctcaattatttttttttctatttcaaaaacaaaaaaaaatgaatatctctcaaaaccctagccctaattttacgtacttctccgatgaaaactttattaatccgtttatggataacaacgatttctcaaatttgatgttctttgacatagatgaaggaggtaacaatggattaatcgaggaagagatctcatctccgacaagcatcgtttcgtcggagacatttaccggggaaagcggcggatccggcagcgcaacaacgttgagtaaaaaggaatcaactaatagaggaagtaaagagagtgatcagacgaaggagacgggtcatcgagttgcatttagaacgagatcgaagattgatgtgatggatgatggttttaaatggaggaagtatggcaagaaatctgtcaaaaacaacattaacaagaggaattactacaaatgctcaagtgaaggttgctcggtgaagaagagggtagagagagatggtgacgatgcagcttatgtaattacaacatatgaaggagtccataaccatgagagtctctctaatgtctattacaatgaaatggttttatcttatgatcatgataactggaaccaacactctcttcttcgatcttaatccaaatctctcatcctcgttgagattgtaagataccaaca

SEQ ID NO: 631 - DNA, 585 bp, Artificial Sequence
  Artificial sequence
  P25742
atgaatatctctcaaaaccctagccctaattttacgtacttctccgatgaaaactttattaatccgtttatggataacaacgatttctcaaatttgatgttctttgacatagatgaaggaggtaacaatggattaatcgaggaagagatctcatctccgacaagcatcgtttcgtcggagacatttaccggggaaagcggcggatccggcagcgcaacaacgttgagtaaaaaggaatcaactaatagaggaagtaaagagagtgatcagacgaaggagacgggtcatcgagttgcatttagaacgagatcgaagattgatgtgatggatgatggttttaaatggaggaagtatggccagaaatctgtcaaaaacaacattaacaagaggaattactacaaatgctcaagtgaaggttgctcggtgaagaagagggtagagagagatggtgacgatgcagcttatgtaattacaacatatgaaggagtccataaccatgagagtctctctaatgtctattacaatgaaatggttttatcttatgatcatgataactggaaccaacactctcttcttcgatcttaa

SEQ ID NO: 632 - DNA, 585 bp, Artificial Sequence
  Artificial sequence
  P25743
atgaatatctctcaaaaccctagccctaattttacgtacttctccgatgaaaactttattaatccgtttatggataacaacgatttctcaaatttgatgttctttgacatagatgaaggaggtaacaatggattaatcgaggaagagatctcatctccgacaagcatcgtttcgtcggagacatttaccggggaaagcggcggatccggcagcgcaacaacgttgagtaaaaaggaatcaactaatagaggaagtaaagagagtgatcagacgaaggagacgggtcatcgagttgcatttagaacgagatcgaagattgatgtgatggatgatggttttaaatggaggaagtatggcaagaaatctgtcaaaaacaacattaacaagaggagttactacaaatgctcaagtgaaggttgctcggtgaagaagagggtagagagagatggtgacgatgcagcttatgtaattacaacatatgaaggagtccataaccatgagagtctctctaatgtctattacaatgaaatggttttatcttatgatcatgataactggaaccaacactctcttcttcgatcttaa

SEQ ID NO: 633 - DNA, 585 bp, Artificial Sequence
  Artificial sequence
  P25745
atgaatatctctcaaaaccctagccctaattttacgtacttctccgatgaaaactttattaatccgtttatggataacaacgatttctcaaatttgatgttctttgacatagatgaaggaggtaacaatggattaatcgaggaagagatctcatctccgacaagcatcgtttcgtcggagacatttaccggggaaagcggcggatccggcagcgcaacaacgttgagtaaaaaggaatcaactaatagaggaagtaaagagagtgatcagacgaaggagacgggtcatcgagttgcatttagaacgagatcgaagattgatgtgatggatgatggttttaaatggaggaagtatggcaagaaatctgtcaaaaacaacattaacaagaggaattactacaaatgctcaagtgaaggttgctcggtgaagaagagggtagagagaagtggtgacgatgcagcttatgtaattacaacatatgaaggagtccataaccatgagagtctctctaatgtctattacaatgaaatggttttatcttatgatcatgataactggaaccaacactctcttcttcgatcttaa

SEQ ID NO: 634 - DNA, 585 bp, Artificial Sequence
  Artificial sequence
  P25746
atgaatatctctcaaaaccctagccctaattttacgtacttctccgatgaaaactttattaatccgtttatggataacaacgatttctcaaatttgatgttctttgacatagatgaaggaggtaacaatggattaatcgaggaagagatctcatctccgacaagcatcgtttcgtcggagacatttaccggggaaagcggcggatccggcagcgcaacaacgttgagtaaaaaggaatcaactaatagaggaagtaaagagagtgatcagacgaaggagacgggtcatcgagttgcatttagaacgagatcgaagattgatgtgatggatgatggttttaaatggaggaagtatggcaagaaatctgtcaaaaacaacattaacaagaggaattactacaaatgctcaagtgaaggttgctcggtgaagaagagggtagagagagatggtgacgatgcagctgtagtaattacaacatatgaaggagtccataaccatgagagtctctctaatgtctattacaatgaaatggttttatcttatgatcatgataactggaaccaacactctcttcttcgatcttaa

SEQ ID NO: 635 - DNA, 585 bp, Artificial Sequence
  Artificial sequence
  P25744
atgaatatctctcaaaaccctagccctaattttacgtacttctccgatgaaaactttattaatccgtttatggataacaacgatttctcaaatttgatgttctttgacatagatgaaggaggtaacaatggattaatcgaggaagagatctcatctccgacaagcatcgtttcgtcggagacatttaccggggaaagcggcggatccggcagcgcaacaacgttgagtaaaaaggaatcaactaatagaggaagtaaagagagtgatcagacgaaggagacgggtcatcgagttgcatttagaacgagatcgaagattgatgtgatggatgatggttttaaatggaggaagtatggcaagaaatctgtcaaaaacaacattaacaagaggaattactacaaatgcacaagtgaaggttgctcggtgaagaagagggtagagagagatggtgacgatgcagcttatgtaattacaacatatgaaggagtccataaccatgagagtctctctaatgtctattacaatgaaatggttttatcttatgatcatgataactggaaccaacactctcttcttcgatcttaa

SEQ ID NO: 636 - DNA, 585 bp, Artificial Sequence
  Artificial sequence
  P25435
atgaatatctctcaaaaccctagccctaattttacgtacttctccgatgaaaactttattaatccgtttatggataacaacgatttctcaaatttgatgttctttgacatagatgaaggaggtaacaatggattaatcgaggaagagatctcatctccgacaagcatcgtttcgtcggagacatttaccggggaaagcggcggatccggcagcgcaacaacgttgagtaaaaaggaatcaactaatagaggaagtaaagagagtgatcagacgaaggagacgggtcatcgagttgcatttagaacgagatcgaagattgatgtgatggatgatggatacaggtggaggaagtacggccaaaaagcagtcaagaacaatccattccccaggagctattataagtgcacagaagaaggatgcagagtgaagaagcaagtgcagaggcaatggggagacgaaggagtggtggtgacgacataccaaggtgttcatacacatgagagtctctctaatgtctattacaatgaaatggttttatcttatgatcatgataactggaaccaacactctcttcttcgatcttaa

SEQ ID NO: 637 - DNA, 1161 bp, Artificial Sequence
  Artificial sequence
  P25255
atgaatatctctcaaaaccctagccctaattttacgtacttctccgatgaaaactttattaatccgtttatggataacaacgatttctcaaatttgatgttctttgacatagatgaaggaggtaacaatggattaatcgaggaagagatctcatctccgacaagcatcgtttcgtcggagacatttaccggggaaagcggcggatccggcagcgcaacaacgttgagtaaaaaggaatcaactaatagaggaagtaaagagagtgatcagacgaaggagacgggtcatcgagttgcatttagaacgagatcgaagattgatgtgatggatgatggttttaaatggaggaagtatggcaagaaatctgtcaaaaacaacattaacaagaggaattactacaaatgctcaagtgaaggttgctcggtgaagaagagggtagagagagatggtgacgatgcagcttatgtaattacaacatatgaaggagtccataaccatgagagtctctctaatgtctattacaatgaaatggttttatcttatgatcatgataactggaaccaacactctcttcttcgatctgcggccgctgccgctgcggcagcggccatggaaaagagaagatggaaaaagaatttcatagccgtctcagcagccaaccgctttaagaaaatctcatcctccggggcacttgattatgatattccaactactgctagcgagaatttgtattttcagggtgagctcaaaaccgcggctcttgcgcaacacgatgaagccgtggacaacaaattcaacaaagaacaacaaaacgcgttctatgagatcttacatttacctaacttaaacgaagaacaacgaaacgccttcatccaaagtttaaaagatgacccaagccaaagcgctaaccttttagcagaagctaaaaagctaaatgatgctcaggcgccgaaagtagacaacaaattcaacaaagaacaacaaaacgcgttctatgagatcttacatttacctaacttaaacgaagaacaacgaaacgccttcatccaaagtttaaaagatgacccaagccaaagcgctaaccttttagcagaagctaaaaagctaaatggtgctcaggcgccgaaagtagacgcgaattccgcggggaagtcaacctga

SEQ ID NO: 638 - DNA, 713 bp, Artificial Sequence; identical to SEQ ID NO: 630
  Artificial sequence
  P8239

SEQ ID NO: 639 - DNA, 1023 bp, Artificial Sequence
  Artificial sequence
  P25253
atgaatatctctcaaaaccctagccctaattttacgtacttctccgatgaaaactttattaatccgtttatggataacaacgatttctcaaatttgatgttctttgacatagatgaaggaggtaacaatggattaatcgaggaagagatctcatctccgacaagcatcgtttcgtcggagacatttaccggggaaagcggcggatccggcagcgcaacaacgttgagtaaaaaggaatcaactaatagaggaagtaaagagagtgatcagacgaaggagacgggtcatcgagttgcatttagaacgagatcgaagattgatgtgatggatgatggttttaaatggaggaagtatggcaagaaatctgtcaaaaacaacattaacaagaggaattactacaaatgctcaagtgaaggttgctcggtgaagaagagggtagagagagatggtgacgatgcagcttatgtaattacaacatatgaaggagtccataaccatgagagtctctctaatgtctattacaatgaaatggttttatcttatgatcatgataactggaaccaacactctcttcttcgatctgcggccgcggctgccgccgcagccgctgctagttacccatacgatgttcctgactatgcgggctatccctatgacgtcccggactatgcaggatcctatccatatgacgttccggattacgcttctagatacccatacgatgttcctgactatgcgggctatccctatgacgtcccggactatgcaggatcctatccatatgacgttccagattacgctactagttacccatacgatgttcctgactatgcgggctatccctatgacgtcccggactatgcaggatcctatccatatgacgttccagattacgcttctagatacccatacgatgttcctgactatgcgggctatccctatgacgtcccggactatgcaggatcctatccatatgacgttccagattacgctactagacaggcctcgtaccagatcctctag

SEQ ID NO: 640 - DNA, 1053 bp, Artificial Sequence
  Artificial sequence
  P26258
atgagttacccatacgatgttcctgactatgcgggctatccctatgacgtcccggactatgcaggatcctatccatatgacgttccagattacgcttctagatacccatacgatgttcctgactatgcgggctatccctatgacgtcccggactatgcaggatcctatccatatgacgttccagattacgctactagttacccatacgatgttcctgactatgcgggctatccctatgacgtcccggactatgcaggatcctatccatatgacgttccagattacgcttctagatacccatacgatgttcctgactatgcgggctatccctatgacgtcccggactatgcaggatcctatccatatgacgttccagattacgctactagacaggcctcgtaccggatcctctacctagagaattccgccgctgccgctgcggcagcggctgcagcgggtaccgtcgacatgaatatctctcaaaaccctagccctaattttacgtacttctccgatgaaaactttattaatccgtttatggataacaacgatttctcaaatttgatgttctttgacatagatgaaggaggtaacaatggattaatcgaggaagagatctcatctccgacaagcatcgtttcgtcggagacatttaccggggaaagcggcggatccggcagcgcaacaacgttgagtaaaaaggaatcaactaatagaggaagtaaagagagtgatcagacgaaggagacgggtcatcgagttgcatttagaacgagatcgaagattgatgtgatggatgatggttttaaatggaggaagtatggcaagaaatctgtcaaaaacaacattaacaagaggaattactacaaatgctcaagtgaaggttgctcggtgaagaagagggtagagagagatggtgacgatgcagcttatgtaattacaacatatgaaggagtccataaccatgagagtctctctaatgtctattacaatgaaatggttttatcttatgatcatgataactggaaccaacactctcttcttcgatcttaa

SEQ ID NO: 641 - DNA, 1846 bp, Artificial Sequence
  Artificial sequence
  P25109
aatagtatgagataaatttcaattgtttctagcatttaaattttgtatgctcaaagttgctggaacgatatggcaaacagaaataatggaatcgaaaaaatatcgtgatatgttagaataaactgagtaaaagtacgtttttgtgaattttcttttgtcattgtaatttgttttaacaaaatacagtattattcttttttacgtactaataaggtatattgttgtatatataaaggtcagtaacttgtaactcatcttttttttttgtttttttttctgttttagctgataggtggttggtgttcattaataaatgtccatatatcactttcaaagcaattcactaaaatatagatatgtaattattttttattttttcagattttccccttgaaaaaggggttctttcaattagaaccccacactaacacactccttcacttttggccagccgcccttctttttcagtctttcagtttatattttagcctcttttttaaaaaatactatattttattgctttttcttcttcttaattacttcagttaatcatagttaaaacacatttttttgtgcaaacgtttaagttttaacactatctgattttaaacttttaatcatttgcatgtaaaatcactcaaataggtaatatttatatgattccagtcatgtgtttcttaaaaacagagccacactacatgtttctgtgtttattctcagttaattagtttttatgtttgttttaacacaatacagagagaatattattgtggttacaaaaacaattaagagtggcaccaagaaatttcgtcttaccttttaagacaagattaaaagaccactttgaaattttgaatcgttgacttaagaatagacttagcaaaaaaacttggtcatatatatatgatatatgtgtgggtcagtataagatgatgatgatacattgcaatgtgccaaaacttctggaagaacaaaaaacgactaataagaaaaaataaaatatataaaatgttgccaacattaaaaaacgcatttgctgtttcccatcaatattggagtatagtttatataagatttttaacaatattataagctagttaattaatagagttaatctttggtaaaaaaacagacggaattttataactttcgaaatcatattgatctgcatatatatatatatatatatatatatatatatatgtggattcaccagaccagatgagataaccattttgaaggatttgctaaataaaagttaggccaaaaagaaatcaataaagtttgtgacaatatctttaatagtataatttacatttacataattcaataagtcaaatcttattgtgtcttggtgtgcactgtaaagtacaagaagtcctgtctgcttcaaacgcagcataagcaaacttacaacttaaatcctcagccgttgatccaaagaccaaaatccaattatcaacgttacctaatgtagacgataaaatctcttaaaatgggcccgtaaagcccaagcaaaaaaacaattactttaagtggaagctcacttttcgccacccttattaacgtctgtccatacgtcataacagatgacgtcatcatcatattccttttttcacacgtggcattgaagcaccttcctagtatctaccctgaaattgcttgacataagtagtagttgtttaataatctttatctcttaattatcctcttttcttaacaaaaacttgttacaataattttcatttttatataaataactgaccattataactctttctcttctcttcttcacttgctctagttcttggatgctttaaacctctctctctctctctctcaatta

SEQ ID NO: 642 - DNA, 1834 bp, Artificial Sequence
  Artificial sequence
  P25110
aatagtatgagataaatttcaattgtttctagcatttaaattttgtatgctcaaagttgctggaacgatatggcaaacagaaataatggaatcgaaaaaatatcgtgatatgttagaataaactgagtataagtacgtttttgtgaattttcttttgtcattgtaatttgttttaacaaaatacagtattattcttttttacgtactaataaggtatattgttgtatatataaaggtcagtaacttgtaactcatcttttttttttgtttttttttctgttttagctgataggtggttggtgttcattaataaatgtccatatatcactttcaaagcaattcactaaaatatagatatgtaattattttttattttttcagattttccccttgaaaaaggggttctttcaattagaaccccacactaacacactccttcacttttggccagccgcccttctttttcagtctttcagtttatattttagcctcttttttaaaaaatactatattttattgctttttcttcttcttaattacttcagttaatcatagttaaaacacattttttttgtgcaaacgtttaagttttaacactatctgattttaaacttttaatcatttgcatgtaaaatcactcaaataggtaatatttatatgattccagtcatgtgtttcttaaaaacagagccacactacatgtttctgtgtttattctcagttaattagtttttatgtttgttttaacacaatacagagagaatattattgtggttacaaaaacaattaagagtggcaccaagaaatttcgtcttaccttttaagacaagattaaaagaccactttgaaattttgaatcgttgacttaagaatagacttagcaaaaaaacttggtcatatatatatgatatatgtgtgggtcagtataagatgatgatgatacattgcaatgtgccaaaacttctggaagaacaaaaaacgactaataagaaaaaataaaatatataaaatgttgccaacattaaaaaacgcatttgctgtttcccatcaatattggagtatagtttatataagatttttaacaatattataagctagttaattaatagagttaatctttggtaaaaaaacagacggaattttataactttcgaaatcatattgatctgcatatatatatatatatgtggattcaccagaccagatgagataaccattttgaaggatttgctaaataaaagttaggccaaaaagaaatcaataaagtttgtgacaatatctttaatagtataatttacatttacataattcaataagtcaaatcttattgtgtcttggtgtgcactgtaaagtacaagaagtcctgtctgcttcaaacgcagcataagcaaacttacaacttaaatcctcagccgttgatccaaagaccaaaatccaattatcaacgttacctaatgtagacgataaaatctcttaaaatgggcccgtaaagcccaagcaaaaaaacaattactttaagtggaagctcacttttcgccacccttattaacgtctgtccatacgtcataacagatgacgtcatcatcatattccttttttcacacgtggcattgaagcaccttcctagtatctaccctgaaattgcttgacataagtagtagttgtttaataatctttatctcttaattatcctcttttcttaacaaaaacttgttacaataattttcatttttatataaataactgaccattataactctttctcttctcttcttcacttgctctagttcttggatgctttaaacctctctctctctctctctcaattaggcca

SEQ ID NO: 643 - DNA, 748 bp, Artificial Sequence; identical to SEQ ID NO: 207
  Artificial sequence
  P486

SEQ ID NO: 644 - DNA, 748 bp, Artificial Sequence; identical to SEQ ID NO: 207
  Artificial sequence
  P3412

SEQ ID NO: 645 - DNA, 2966 bp, Artificial Sequence
  Artificial sequence
  P25111
gtccttccataagagcagcaagatgaatagttttgtttcctggagctgaacaggcatcaagaaccttgataacataggaaaaataaagcacattaactaggcagacaagatacattaagtctattccacaatcaccatgagaaacaccaaatgggacattttttgtcaaatggaaaaatactggtaaatgaatgcgagaactgtggcctacctcccatcctgcttgtggctgcagtgctgctgctaccattgaacttgctttcccctatcatttgaaagaataaatgtcagtcaaattaaccaaatatcaaacagaattcacaaagatcattcacaatttacctgcaaaaatatacgtccattcgcaaccaaacgatgagcatgcaaatcgctgccagggggcaacaccaacaagtcaggaactgtctcgtccttctgcacctgtttttatagtgaaaaaatacgagttaaaatgaaatctcataacaaagagaagattgtgacatcatagaaagcacagttcacatatattgtacacatccaagattttaacatcactaactatacgaggattcagagaaaactcccccggtgaatgacttaaactagacctcccttccacaataactaattctaacactcatcctgcgagaactaaacaacatatctagcacacaagtattcttcaaggtttatataaaaaacttggaaagtaccgtgtaatgcttctccagctcctgcactgcagaatccacatccatcttaagcgtattaacacgaacataccgtggtttcaaatgacctgcatccaaatttaaaaatcaagctacagaaacatactcaaaagccaaaagtaagtgaaacacattatataaaggagggtaacaaaataccagtaagcttagaacccaacaactgatcaacactatcgactttcttcctcactaaaagcgtagctaaacctgacaataacgcctctttatgccgcataagaaacttctctgcatcaccaattgatggagtatcctacaatcacaaattcctcttctagtaaaccaaaacatcttaattcatcacagaaaattgaattaagctattacaacagaaccagtcgcaactggcgaccacctaccttgccaaagaggatatcgtagcaaacgatgaagaccaatggctcttgcctctacaaacaaaagtaaactaagcattaaagataagtgaaacagagcaattttagcaaattcatatgaacaaatacataccttccatttactattcaatacattagctatatcaagaacatctttaatcacagtaagatctgaatacacaacaaattagttccttaagctcaaaattaggaacgaagaagaagaagaagaagtttagttacatttgagagtctcgcagacaagagcgaaagtgccgcgtttgttgcgaacggaaggacttaagacgagtgatttgatggaagcaacggctcgtcgctcggcgtcaccacggagaacggtacggagtatattagctgcttctcttctggcgtagagagctgatctctctaagctggaaaacttttgcttagtagctggtggtgtttttggtttgcgactctcggcgccggaaaatcgttgttttcccggcggcgtttttggtttgtgactctcgacgccggaaaacttttgctttgtagctggtgatgtttttggtttgtggctctcgacgccggaaaatggttgtttagtagccggtggtggttttggtttgtgactgtcgccgccggaaaatcggtgtttcaccagcggcgcttttggtttgttacgacgcgccaccatgataacctctcagtctctctcccctcacaaaaactaaaaccctttttcttcgtcttggtgactttaaacgcaccgttttcggtttcagttaaaccggatcaaattcctatagcaccaatttacatattttactccggttcacaacaaattgtggttcaagcccatgttggcatgttcagtatcacgatcttgttcagtttcagatttgtgtccttgagtttttatgagagttttccaaatgtctacatctatcgacttattacatttttcaatcttgttaagtcagtatttcaaaaatgattacataaccatcaaattcataacacaaacaagaagagtggtgtataatatctagattcacagcatcacgtcgatcatgtaatttattcatcgatctcaatgactcaatccttacataagtgtatatgttttgaaacaacgtcttgagaattgtttcaaagttagatattgcaatttgcatagtatatacactaaaacatatttctatatcatctaacaatactttttgtataaaaaagaagaagaatatgactccgcattagtgcgcaagtccttagaaaccgaggaatggtacataacaagtcctcttgactagaaaattcaaagtgttctaagttataaagataaggcaaccaaacgttgaaaattaaactcaacagtctaatccaaagagaatctatcttttgtcatttaatttatgttcaaatatgtctctattgcttggaaacacagatgcaaaaagaaagaaaaaaatggtgtctttaagatgagagatggtaatttgcggtagcgtaacttaagcattaagtccttgcacaagaagacttgtgaaaagacttgaaaaaaacaagaaaaataataaaaagagtaatcgtggaccaagacacaagtcaaccactagtctttgtcatagagaaagaacaaataaggctttgaagcatccatcttcctatgtaagtttccttaaagaaactgttacacacaagtactcattttcttacaaacactaaacatcgaagcttcctttctaaagtaaagtcttcagaccaagaaaagggaagatcacgcattcttataggcgtaattcgtaaatagtggtgagtatgaatgatg

SEQ ID NO: 646 - DNA, 2963 bp, Artificial Sequence
  Artificial sequence
  P25996
gtccttccataagagcagcaagatgaatagttttgtttcctggagctgaacaggcatcaagaaccttgataacataggaaaaataaagcacattaactaggcagacaagatacattaagtctattccacaatcaccatgagaaacaccaaatgggacattttttgtcaaatggaaaaatactggtaaatgaatgcgagaactgtggcctacctcccatcctgcttgtggctgcagtgctgctgctaccattgaacttgctttcccctatcatttgaaagaataaatgtcagtcaaattaaccaaatatcaaacagaattcacaaagatcattcacaatttacctgcaaaaatatacgtccattcgcaaccaaacgatgagcatgcaaatcgctgccagggggcaacaccaacaagtcaggaactgtctcgtccttctgcacctgtttttatagtgaaaaaatacgagttaaaatgaaatctcataacaaagagaagattgtgacatcatagaaagcacagttcacatatattgtacacatccaagattttaacatcactaactatacgaggattcagagaaaactcccccggtgaatgacttaaactagacctcccttccacaataactaattctaacactcatcctgcgagaactaaacaacatatctagcacacaagtattcttcaaggtttatataaaaaacttggaaagtaccgtgtaatgcttctccagctcctgcactgcagaatccacatccatcttaagcgtattaacacgaacataccgtggtttcaaatgacctgcatccaaatttaaaaatcaagctacagaaacatactcaaaagccaaaagtaagtgaaacacattatataaaggagggtaacaaaataccagtaagcttagaacccaacaactgatcaacactatcgactttcttcctcactaaaagcgtagctaaacctgacaataacgcctctttatgccgcataagaaacttctctgcatcaccaattgatggagtatcctacaatcacaaattcctcttctagtaaaccaaaacatcttaattcatcacagaaaattgaattaagctattacaacagaaccagtcgcaactggcgaccacctaccttgccaaagaggatatcgtagcaaacgatgaagaccaatggctcttgcctctacaaacaaaagtaaactaagcattaaagataagtgaaacagagcaattttagcaaattcatatgaacaaatacataccttccatttactattcaatacattagctatatcaagaacatctttaatcacagtaagatctgaatacacaacaaattagttccttaagctcaaaattaggaacgaagaagaagaagaagaagtttagttacatttgagagtctcgcagacaagagcgaaagtgccgcgtttgttgcgaacggaaggacttaagacgagtgatttgatggaagcaacggctcgtcgctcggcgtcaccacggagaacggtacggagtatattagctgcttctcttctggcgtagagagctgatctctctaagctggaaaacttttgcttagtagctggtggtgtttttggtttgcgactctcggcgccggaaaatcgttgttttcccggcggcgtttttggtttgtgactctcgacgccggaaaacttttgctttgtagctggtgatgtttttggtttgtggctctcgacgccggaaaatggttgtttagtagccggtggtggttttggtttgtgactgtcgccgccggaaaatcggtgtttcaccagcggcgcttttggtttgttacgacgcgccaccatgataacctctcagtctctctcccctcacaaaaactaaaaccctttttcttcgtcttggtgactttaaacgcaccgttttcggtttcagttaaaccggatcaaattcctatagcaccaatttacatattttactccggttcacaacaaattgtggttcaagcccatgttggcatgttcagtatcacgatcttgttcagtttcagatttgtgtccttgagtttttatgagagttttccaaatgtctacatctatcgacttattacatttttcaatcttgttaagtcagtatttcaaaaatgattacataaccatcaaattcataacacaaacaagaagagtggtgtataatatctagattcacagcatcacgtcgatcatgtaatttattcatcgatctcaatgactcaatccttacataagtgtatatgttttgaaacaacgtcttgagaattgtttcaaagttagatattgcaatttgcatagtatatacactaaaacatatttctatatcatctaacaatactttttgtataaaaaagaagaagaatatgactccgcattagtgcgcaagtccttagaaaccgaggaatggtacataacaagtcctcttgactagaaaattcaaagtgttctaagttataaagataaggcaaccaaacgttgaaaattaaactcaacagtctaatccaaagagaatctatcttttgtcatttaatttatgttcaaatatgtctctattgcttggaaacacagatgcaaaaagaaagaaaaaaatggtgtctttaagatgagagatggtaatttgcggtagcgtaacttaagcattaagtccttgcacaagaagacttgtgaaaagacttgaaaaaaacaagaaaaataataaaaagagtaatcgtggaccaagacacaagtcaaccactagtctttgtcatagagaaagaacaaataaggctttgaagcatccatcttcctatgtaagtttccttaaagaaactgttacacacaagtactcattttcttacaaacactaaacatcgaagcttcctttctaaagtaaagtcttcagaccaagaaaagggaagatcacgcattcttataggcgtaattcgtaaatagtggtgagtatgaatg

SEQ ID NO: 647 - DNA, 873 bp, Artificial Sequence
  Artificial sequence
  P714
ccattggacttttggaacataagctatgcaaactgaggagcttttgtcgccaccacagactccttggtggaatgcttttggatctcagccgttgactacagagagcctttccggcgaagcttctgattcattcaccggagttaaggcagttactacggaggcagaacaaggtgtggtggataaacaaacttctacaactctcttcactttctcacctggtggtgaaaagagttcaagagatgtgccaaagcctcatgttgctttcgcgatgcaatcagcttgcttcgagtttggatttgctcagccaatgatgtacacaaagcatcctcatgttgaacaatactatggagttgtttcagcatacggatctcagaggtcttcgggccgagtaatgattccactgaagatggagacagaagaagatggtaccatctatgtgaactcaaagcagtaccatggaattatcaggcgacgccagtcccgagcaaaggctgaaaaactgagtagatgccgtaagccatatatgcatcactcacgccatctccatgctatgcgccgtcctagaggatctggcgggcgtttcttgaacaccaagacagctgatgcggctaagcagtctaagccgagtaattctcagagttctgaagtctttcatccggaaaatgagaccataaactcatcgagggaagcaaatgagtcaaatctctcggattctgcagttacaagtatggattactttctaagttcgtcggcttattctcctggtggcatggtcatgcctatcaagtggaatgcagcagcaatggatattggctgctgcaaacttaatatatgatcagcagataggggacaagacatgattggtcaccagtc

SEQ ID NO: 648 - DNA, 1554 bp, Artificial Sequence
  Artificial sequence
  P26238
atgcaaactgaggagcttttgtcgccaccacagactccttggtggaatgcttttggatctcagccgttgactacagagagcctttccggcgaagcttctgattcattcaccggagttaaggcagttactacggaggcagaacaaggtgtggtggataaacaaacttctacaactctcttcactttctcacctggtggtgaaaagagttcaagagatgtgccaaagcctcatgttgctttcgcgatgcaatcagcttgcttcgagtttggatttgctcagccaatgatgtacacaaagcatcctcatgttgaacaatactatggagttgtttcagcatacggatctcagaggtcttcgggccgagtaatgattccactgaagatggagacagaagaagatggtaccatctatgtgaactcaaagcagtaccatggaattatcaggcgacgccagtcccgagcaaaggctgaaaaactgagtagatgccgtaagccatatatgcatcactcacgccatctccatgctatgcgccgtcctagaggatctggcgggcgtttcttgaacaccaagacagctgatgcggctaagcagtctaagccgagtaattctcagagttctgaagtctttcatccggaaaatgagaccataaactcatcgagggaagcaaatgagtcaaatctctcggattctgcagttacaagtatggattactttctaagttcgtcggcttattctcctggtggcatggtcatgcctatcaagtggaatgcagcagcaatggatattggctgctgcaaacttaatatagcggccgctgccgctgcggcagcggccatggtgagcaagggcgaggagctgttcaccggggtggtgcccatcctggtcgagctggacggcgacgtaaacggccacaagttcagcgtgtccggcgagggcgagggcgatgccacctacggcaagctgaccctgaagttcatctgcaccaccggcaagctgcccgtgccctggcccaccctcgtgaccaccttcggctacggcctgcagtgcttcgcccgctaccccgaccacatgaagcagcacgacttcttcaagtccgccatgcccgaaggctacgtccaggagcgcaccatcttcttcaaggacgacggcaactacaagacccgcgccgaggtgaagttcgagggcgacaccctggataaccgaatcgagctgaagggcatcgacttcaaggaggacggcaacatcctggggcacaagctggagtacaactacaacagccacaacgtctatatcatggccgacaagcagaagaacggcatcaaggtgaacttcaagatccgccacaacatcgaggacggcagcgtgcagctcgccgaccactaccagcagaacacccccatcggcgacggccccgtggtgctgcccgacaaccactacctgagctaccagtccgccctgagcaaagaccccaacgagaagcgcgatcacatggtcctgctggagttcgtgaccgccgccgggatcactctcggcatggacgagctgtacaagtaa

SEQ ID NO: 649 - DNA, 1266 bp, Artificial Sequence
  Artificial sequence
  P26108
atggcggagtcgcaggccaagagtcccggaggctgtggaagccatgagagtggtggagatcaaagtcccaggtcgttacatgttcgtgagcaagataggtttcttccgattgctaacataagccgtatcatgaaaagaggtcttcctgctaatgggaaaatcgctaaagatgctaaggagattgtgcaggaatgtgtctctgaattcatcagtttcgtcaccagcgaagcgagtgataaatgtcaaagagagaaaaggaagactattaatggagatgatttgctttgggcaatggctactttaggatttgaagactacatggaacctctcaaggtttacctgatgagatatagagagatggagggtgacacaaagggatcagcaaaaggtggggatccaaatgcaaagaaagatgggcaatcaagccaaaatggccagttctcgcagcttgctcaccaaggtccttatgggaactctcaagctcagcagcatatgatggttccaatgccgggaacagacgcggccgctgccgctgcggcagcggccatggtgagcaagggcgaggagctgttcaccggggtggtgcccatcctggtcgagctggacggcgacgtaaacggccacaagttcagcgtgtccggcgagggcgagggcgatgccacctacggcaagctgaccctgaagttcatctgcaccaccggcaagctgcccgtgccctggcccaccctcgtgaccaccctgacctggggcgtgcagtgcttcagccgctaccccgaccacatgaagcagcacgacttcttcaagtccgccatgcccgaaggctacgtccaggagcgcaccatcttcttcaaggacgacggcaactacaagacccgcgccgaggtgaagttcgagggcgacaccctggtgaaccgcatcgagctgaagggcatcgacttcaaggaggacggcaacatcctggggcacaagctggagtacaactacatcagccacaacgtctatatcaccgccgacaagcagaagaacggcatcaaggccaacttcaagatccgccacaacatcgaggacggcagcgtgcagctcgccgaccactaccagcagaacacccccatcggcgacggccccgtgctgctgcccgacaaccactacctgagcacccagtccgccctgagcaaagaccccaacgagaagcgcgatcacatggtcctgctggagttcgtgaccgccgccgggatcactctcggcatggacgagctgtacaagtaa

SEQ ID NO: 650 - DNA, 1331 bp, Artificial Sequence
  Artificial sequence
  P4357
ttgtgttaattgttgtaaagttagggtttttttttctttctgagatggcggagtcgcaggccaagagtcccggaggctgtggaagccatgagagtggtggagatcaaagtcccaggtcgttacatgttcgtgagcaagataggtttcttccgattgctaacataagccgtatcatgaaaagaggtcttcctgctaatgggaaaatcgctaaagatgctaaggagattgtgcaggaatgtgtctctgaattcatcagtttcgtcaccagcgagtatgtcttttttaaccttttaacaatgctatgttgtgtttgctcttgctgaatgtttagaggcttgataggaactttgagttttagtttcaagtcttaaactttatagtgatttttgggtttttcttaactagtgaaagttgaggcctttttagtccttacattggttactctttcttgttgttcatctttgtttggctttgatgttgcatatttgatgatgcaatggtttttctatgacgttgatgagcagagcgagtgataaatgtcaaagagagaaaaggaagactattaatggagatgatttgctttgggcaatggctactttaggatttgaagactacatggaacctctcaaggtttacctgatgagatatagagaggtatgttctgagtacgatgtttattagttatgctgttgtgtgaagagagtttttgaatttcactaacttactctgtttctccttttccttttcttgctctactacgtgaactggaatatcacagatggaggtcagtggttcttcttattctatttcttgttcattcctaaaacttgcaacgatctatgatctttatggcttccgtgaatcatctctttttgtcaacttatgtatcaaactatttatgctttccttatccttttcaatgatcaatagggtgacacaaagggatcagcaaaaggtggggatccaaatgcaaagaaagatgggcaatcaagccaaaatggccaggtatatgtctcaaatctcatgcctttgaccattttttcgtcttcgcattcatctgcacgtattctctcttccgctttagctaagttagtctgacattcatggggtttgtttaccatttggcagttctcgcagcttgctcaccaaggtccttatgggaactctcaagtaacttttcctctcttctcttcacactcaagcaatacgcatcattctcttctaatttgttaagaattgaaaacttgtaaagcatcacttatgttataatctatgaatacctcaaaatctgtgaactaatttgacattggactcggtataattgtaggctc

SEQ ID NO: 651 - DNA, 794 bp, Artificial Sequence
  Artificial sequence
  P1636
aaaaaaaacttatggaatattcccaatcttccatgtattcatctccaagttcttggagctcatcacaagaatcactcttatggaacgagagctgtttcttggatcaatcatctgaacctcaagccttcttttgccctaattatgattactccgatgactttttctcatttgagtcaccggagatgatgattaaggaagaaattcaaaacggcgacgtttctaactccgaagaagaagaaaaggttggaattgatgaagaaagatcatacagaggagtgaggaaaaggccgtgggggaaatttgcagcggagataagagattcaacgaggaatggaattagggtttggctcgggacatttgacaaagccgaggaagccgctcttgcttatgatcaagcggctttcgccacaaaaggatctcttgcaacacttaatttcccggtggaagtggttagagagtcgctaaagaaaatggagaatgtgaatcttcatgatggaggatctccggttatggccttgaagagaaaacattctcttcgaaaccggcctagagggaaaaagcgatcctcttcttcttcttcttcttcttctaattcttcttcttgctcttcttcttcgtctacttcttcaacatcaagaagtagtagtaagcagagtgttgtgaagcaagaaagtggtacacttgtggtttttgaagatttaggtgctgagtatttagaacaacttcttatgagctcatgttgatcttgtaattgatttcagcaaaagccactattaaactttaattttgtgata

SEQ ID NO: 652 - DNA, 794 bp, Artificial Sequence; identical to SEQ ID NO: 651
  Artificial sequence
  P4390

SEQ ID NO: 653 - DNA, 699 bp, Artificial Sequence
  Artificial sequence
  P1224
ccctcctcttagcttcaaccgccggaaaaactaaacaaccttcttggaaaaaaagagaaactaaaaatgaactatccttcaaaccctaaccctagctccacagatttcactgaatttttcaagttcgatgattttgacgatacttttgagaagatcatggaagaaatcggccgtgaggaccactcgtcgtcaccgactttgagttggagttcatcggaaaagttagtggctgcagaaatcacaagcccgcttcaaacaagcctagctacctcacctatgagctttgaaataggtgacaaagatgaaatcaaaaagaggaagagacacaaagaagatccgattattcacgtcttcaaaacgaaatcatcaattgatgaaaaggttgctttagatgatgggtataaatggaggaaatacggaaagaagccgataacgggtagtccatttccaaggcattatcacaagtgttcgagcccagattgcaacgtgaagaagaagatcgaaagagatacgaacaatccagattacatattgacaacatacgaaggtagacataaccacccaagcccttctgtagtttattgtgattcagacgactttgatcttaactctctcaacaattggtcctttcagacggcaaatacgtatagtttctctcattctgctccatattgatcgatcgtagttacaagtttgtgt

SEQ ID NO: 654 - DNA, 2296 bp, Artificial Sequence
  Artificial sequence
  P25113
gtcgaccaaaccggtgcttcaccacgcgcctaacaacgacaaaaactgtattaacactttaaattaatcaaatctccacggcaaaatggctcacggaaaatgacgtaagcatgctggcgtattttcactgacgtcatgtgccttcgaccttgaggttgtgcagtaactagcaataagatacacttacaacatgcaataagatattaatagttcatgtagcaactattacgtctcgctattggttgctcaaattttaaatctaaagtttctattatcaattttctatgctggtaacaaaaggtgctttttcctacatagttacagaaaaagtcgcactttacatgaatcataatgatggcttttaatcggcatattccagaattcttttgttaaaagatgatataattaaccactggcaaaaaaatataagaaaatcattagtgatggtaacaatttcgccatctgagaattgcttttgagaaaattagttcagttgccttttaaaaatgcattttaccgcaaagccgtctagtgtttcccgaatttgaataattatttaatatctctttaaaatgtgataggtgtttatttattatatattgattttggcaacgcatgcagaggttggtgtttgaccataattatttaaaatgtccgacaacttgccctataaggctatttgtattagaattaaaaacaacaatggaactacttgtacaataagtttaagatccgtaaaggatagaatctgagctattagatatcttttaaattgttttaaataatttttgtctctttttggttaggccaaagttaaaaagaaaaactgatgagacgtggtgccaaagtgactttggttggctaatacaatgcagcctaaaattagacgtagttttatgtccgttgatccatacttgtttaggtccagaaaacataattctaagaaaactgtcacctacgaaattccaaaaacatttgctgatcagtttgatacatgtccttgagtattcagggtgccttaattcgtttgtattaatatcgtctcatcacaatttcgatgttctttttaaatggtggttcttctgtcaattacaaatcgaatggcactctacaatcgacagtatttttttaacttacttgcatcaaagtcagtctctaataccgtatgaactttaataattttgaacgcaaaacaaattggttatgagtgaattggtacttgatatatttcctatacattactttaggttctttttaacttttttttgtgttgtaaacattattttttaattttcgacgtgatatcttaacacgtactattactaaagaaatgatgatggttataatcgatcaattttaaaccggcatttaacttaggtcatcctacttggattaacaaactgagttttattatcatttatgaagttcacgggttctaactcaaaaattaataaaaaaatactagattttccttaaatattactttaaatttttcctaactttgtgaaatcataatacaatcccaagttgatagcgctcttatcagctaatgtcgaataaaatcccactctaagatcaacaattaataaaatatccctccttgaaccattctatttagatcaaactcggctctataccatgtttattttcatgaacttataacccaaaaccaattacaaatacttgtattggttcatatctcatatgtgtcttctttcttaccttagatatggaatttctaatatattcatacataagttagaagcatgttaacgagacctaggttttctgacccaccatcatctgttggttcgtttgctagctacatcatttcgaaatctagctttgattaaaagtgattaattagtgtaatatgattatatatgaagggaccagtgatgttacatgcattttttactcgaggatttgattggacaacgcttcaaaacttttttataaaaccttaaagttgttaaaaagtaaaatttcccacttttatgggtactttatttttaacttaaataaatgataattaataaagaaaaatcacttgtcgctatagctattctattggagaagcttcgttgaatctacgcacgaaagtagccatgaaagttattttattacttaattaaaagcaaatagacttttattttattttattaattctatcattatttttcttagattttgtagtataaataaacagtattactctaacaatatctgtccctcctcttagcttcaaccgccggaaaaactaaacaaccttcttggaaaaaaagagaaactaaaa

SEQ ID NO: 655 - DNA, 2296 bp, Artificial Sequence; identical to SEQ ID NO: 654
  Artificial sequence
  P25114

SEQ ID NO: 656 - DNA, 719 bp, Artificial Sequence
  Artificial sequence
  P965
cagattgatcacatgtggttaacatcaatcaaaaaaaaaaacaaagagatagagatatgactgaggagagcccagaagaagatcatgggtctcctggagtagctgaaacaaatccaggaagcccttcttcaaagaccaacaacaacaacaacaacaacaaagaacaagaccggtttcttcccattgcgaatgtcggaaggatcatgaaaaaagttcttcccggtaacggtaagatctcaaaagacgctaaagaaaccgttcaagaatgtgtctcggagttcattagtttcgtcactggtgaagcttctgacaagtgtcaaagagaaaagaggaagaccatcaatggagatgatatcatttgggctatcacaactctcggtttcgaagactacgtggctccattaaaggtctacctctgcaaatatagagacaccgaaggagagaaagttaacagcccaaaacaacaacaacaaagacaacaacaacagcagattcaacaacagaatcatcataattatcagtttcaagaacaagaccaaaacaataacaacatgtcatgtactagttacatctctcatcatcatccttctccattcctaccagtggatcatcaaccttttcccaatattgctttctctcctaaatcattgcagaaacagttcccgcagcagcatgataataacattgattcaattcactggtgagagagacatttgctt

SEQ ID NO: 657 - DNA, 1342 bp, Artificial Sequence
  Artificial sequence
  P26043
atgactgaggagagcccagaagaagatcatgggtctcctggagtagctgaaacaaatccaggaagcccttcttcaaagaccaacaacaacaacaacaacaacaaagaacaagaccggtttcttcccattgcgaatgtcggaaggatcatgaaaaaagttcttcccggtaacggtaagatctcaaaagacgctaaagaaaccgttcaagaatgtgtctcggagttcattagtttcgtcactggtgaagcttctgacaagtgtcaaagagaaaagaggaagaccatcaatggagatgatatcatttgggctatcacaactctcggtttcgaagactacgtggctccattaaaggtctacctctgcaaatatagagacaccgaaggagagaaagttaacagcccaaaacaacaacaacaaagacaacaacaacagcagattcaacaacagaatcatcataattatcagtttcaagaacaagaccaaaacaataacaacatgtcatgtactagttacatctctcatcatcatccttctccattcctaccagtggatcatcaaccttttcccaatattgctttctctcctaaatcattgcgcggccgctgccgctgcggcagcggccatggtgagcaagggcgaggagctgttcaccggggtggtgcccatcctggtcgagctggacggcgacgtaaacggccacaagttcagcgtgtccggcgagggcgagggcgatgccacctacggcaagctgaccctgaagttcatctgcaccaccggcaagctgcccgtgccctggcccaccctcgtgaccaccctgacctggggcgtgcagtgcttcagccgctaccccgaccacatgaagcagcacgacttcttcaagtccgccatgcccgaaggctacgtccaggagcgcaccatcttcttcaaggacgacggcaactacaagacccgcgccgaggtgaagttcgagggcgacaccctggtgaaccgcatcgagctgaagggcatcgacttcaaggaggacggcaacatcctggggcacaagctggagtacaactacatcagccacaacgtctatatcaccgccgacaagcagaagaacggcatcaaggccaacttcaagatccgccacaacatcgaggacggcagcgtgcagctcgccgaccactaccagcagaacacccccatcggcgacggccccgtgctgctgcccgacaaccactacctgagcacccagtccgccctgagcaaagaccccaacgagaagcgcgatcacatggtcctgctggagttcgtgaccgccgccgggatcactctcggcatggacgagctgtacaagtaa

SEQ ID NO: 658 - DNA, 1314 bp, Artificial Sequence
  Artificial sequence
  P25079
atggaacgtatagagtcttataacacgaatgagatgaaatacagaggcgtacgaaagcgtccatggggaaaatatgcggcggagattcgcgactcagctagacacggtgctcgtgtttggcttgggacgtttaacacagcggaagacgcggctcgggcttatgatagagcagctttcggcatgagaggccaaagggccattctcaattttcctcacgagtatcaaatgatgaaggacggtccaaatggcagccacgagaatgcagtggcttcctcgtcgtcgggatatagaggaggaggtggtggtgatgatgggagggaagttattgagttcgagtatttggatgatagtttattggaggagcttttagattatggtgagagatctaaccaagacaattgtaacgacgcagcggccgctgaagctcgaaaaacaaagaaaaaaatcaaagggattcagcaagccactgcaggagtctcacaagacacttcggaaaatcctaacaaaacaatagttcctgcagcattaccacagctcacccctaccttggtgtcactgctggaggtgattgaacccgaggtgttgtatgcaggatatgatagctctgttccagattcagcatggagaattatgaccacactcaacatgttaggtgggcgtcaagtgattgcagcagtgaaatgggcaaaggcgataccaggcttcagaaacttacacctggatgaccaaatgaccctgctacagtactcatggatgtttctcatggcatttgccctgggttggagatcatacagacaatcaagtggaaacctgctctgctttgctcctgatctgattattaatgagcagagaatgtctctaccctgcatgtatgaccaatgtaaacacatgctgtttgtctcctctgaattacaaagattgcaggtatcctatgaagagtatctctgtatgaaaaccttactgcttctctcctcagttcctaaggaaggtctgaagagccaagagttatttgatgagattcgaatgacttatatcaaagagctaggaaaagccatcgtcaaaagggaagggaactccagtcagaactggcaacggttttaccaactgacaaagcttctggactccatgcatgaggtggttgagaatctccttacctactgcttccagacatttttggataagaccatgagtattgaattcccagagatgttagctgaaatcatcactaatcagataccaaaatattcaaatggaaatatcaaaaagcttctgtttcatcaaaaatctagacaggcctcgtaccggatcctctag

SEQ ID NO: 659 - DNA, 1305 bp, Artificial Sequence
  Artificial sequence
  P25094
atgaaccttgaagctcgaaaaacaaagaaaaaaatcaaagggattcagcaagccactgcaggagtctcacaagacacttcggaaaatcctaacaaaacaatagttcctgcagcattaccacagctcacccctaccttggtgtcactgctggaggtgattgaacccgaggtgttgtatgcaggatatgatagctctgttccagattcagcatggagaattatgaccacactcaacatgttaggtgggcgtcaagtgattgcagcagtgaaatgggcaaaggcgataccaggcttcagaaacttacacctggatgaccaaatgaccctgctacagtactcatggatgtttctcatggcatttgccctgggttggagatcatacagacaatcaagtggaaacctgctctgctttgctcctgatctgattattaatgagcagagaatgtctctaccctgcatgtatgaccaatgtaaacacatgctgtttgtctcctctgaattacaaagattgcaggtatcctatgaagagtatctctgtatgaaaaccttactgcttctctcctcagttcctaaggaaggtctgaagagccaagagttatttgatgagattcgaatgacttatatcaaagagctaggaaaagccatcgtcaaaagggaagggaactccagtcagaactggcaacggttttaccaactgacaaagcttctggactccatgcatgaggtggttgagaatctccttacctactgcttccagacatttttggataagaccatgagtattgaattcccagagatgttagctgaaatcatcactaatcagataccaaaatattcaaatggaaatatcaaaaagcttctgtttcatcaaaaaggtaccgtcgacatggaacgtatagagtcttataacacgaatgagatgaaatacagaggcgtacgaaagcgtccatggggaaaatatgcggcggagattcgcgactcagctagacacggtgctcgtgtttggcttgggacgtttaacacagcggaagacgcggctcgggcttatgatagagcagctttcggcatgagaggccaaagggccattctcaattttcctcacgagtatcaaatgatgaaggacggtccaaatggcagccacgagaatgcagtggcttcctcgtcgtcgggatatagaggaggaggtggtggtgatgatgggagggaagttattgagttcgagtatttggatgatagtttattggaggagcttttagattatggtgagagatctaaccaagacaattgtaacgacgcaaaccgctag

SEQ ID NO: 660 - DNA, 523 bp, Artificial Sequence
  Artificial sequence
  P1694
tgcaaaaacaaaaaccttaaaagctttcatggaacgtatagagtcttataacacgaatgagatgaaatacagaggcgtacgaaagcgtccatggggaaaatatgcggcggagattcgcgactcagctagacacggtgctcgtgtttggcttgggacgtttaacacagcggaagacgcggctcgggcttatgatagagcagctttcggcatgagaggccaaagggccattctcaattttcctcacgagtatcaaatgatgaaggacggtccaaatggcagccacgagaatgcagtggcttcctcgtcgtcgggatatagaggaggaggtggtggtgatgatgggagggaagttattgagttcgagtatttggatgatagtttattggaggagcttttagattatggtgagagatctaaccaagacaattgtaacgacgcaaaccgctagatcatcactacttacttacagtgtaatgtttttggagtaaagagtaataatcaatataatatactttagtttagg

SEQ ID NO: 661 - DNA, 522 bp, Artificial Sequence
  Artificial sequence
  P4406
tgcaaaaacaaaaaccttaaaagctttcatggaacgtatagagtcttataacacgaatgagatgaaatacagaggcgtacgaaagcgtccatggggaaaatatgcggcggagattcgcgactcagctagacacggtgctcgtgtttggcttgggacgtttaacacagcggaagacgcggctcgggcttatgatagagcagctttcggcatgagaggccaaagggccattctcaattttcctcacgagtatcaaatgatgaaggacggtccaaatggcagccacgagaatgcagtggcttcctcgtcgtcgggatatagaggaggaggtggtggtgatgatgggagggaagttattgagttcgagtatttggatgatagtttattggaggagcttttagattatggtgagagatctaaccaagacaattgtaacgacgcaaaccgctagatcatcactacttacttacagtgtaatgtttttggagtaaagagtaataatcaatataatatactttagtttag

SEQ ID NO: 662 - DNA, 2997 bp, Artificial Sequence
  Artificial sequence
  P25121
cacaaatactgtattccctagaaaatttgaggagatatatatcttttgttattggaaaatatatattaaagatttgagagaattttggaattttaaaccaaattttattctcgtgaaaaaaaacatatcgaattttaacaagaaaatcggaatcggttttatagtattaataaattaattaattttttaaaaatgtataataatatgtggggcttttagagagccacgcatttggcaaatgaaaatggttggggtcaagagtgaagagaatcgttcagtgttggaccacttttcttaaaaaaggcggggcattacgtttcgttttttgtattggttcgatttgtttatgtatagttaatggtagcatttgcactatcttaataagtgtgcatgttgatgtagcatcacattacacacatgtctaactttagattatggtgaacactagctactcgtcacatatgtcgtatatgaagtctttgggataggattgaattgatgcagattatcatgttctaaaattaaatcataatcatgttgatctcatagtattgtatgtaatatataacttatttcttatgatgttcacaaaattgtctcaagtaaaacaaaataatagtttaaacatctcttaacatgagttgcatggtgtgactaacaaaaataaacatttgcctaatgtcctaaaatatcatacatattttggggtcccaaataatcgttaattgatatattggtaaataatttctgttaactatatcttattttttcgttttcttttaactatatcttaattgagtataaacttcattttcgtatatttaaaaatttatttactcatgtataaactgaaaatatttatgaaatcagtatttcaaatttttcatttattatttgtaatacgtcgtttccaaaacttgacactaccaagaaataaaagaagtatatagtacgtagttttgtcaatattctagagcgagcagtatccacaaactcaatagaaggccaaaccaattacttgtttggtcaaaaagtcgaagacttgtgaaagagttggcacttgacatggaaaaaaaatctaactttgataaaagcaggaacaaataaaagacacaaagtgggaaaatggccaatcgaagaaaaggaaagacaagtgaagcagtgtcatgatcattacagtgaaagaatcaaagaatcattcatgttttcttttaagtttttgacacttggaagttggaacaacaaaacgttcgttggtgttttcaaacgccgccatgcatcttcggatttcaagcatctatctcccggagatgatcttttcattatattttatctttgtaatttaaaacctatgttatgaaattatttggtacatttttttgtttaagtgaaattatttggtacatgctgatgttacttccacaactttatccaatttctgaattagatttctttcgttttgttttatactcatgaaaatacacatttcaatactcgaaattattttaagcataacccacatccaacatgtgatgggacctatagtgatatgagataatacactcattgttaattaatttcaagttaaaagctatgaaacttaatgtggtattagagaccatatttgatctacgtaatatttgcatagtgtgatcaattcgaaattggacggaaaaccattatttcgaggagaacgtgttaggaatttcacattgaaaagatgatacgacctagggtaatatataaagttaacaaaagtgaacatattctattggatgttaaagttgttctcctacatattttgagatgaagatgtttttataaactaatatcctttgtccaatatatggccttcaagcattggtgggaaacagtttgttgggcttattgggtcgctcaacatacccagtaacaatgtcgaattaagaggcctaagcccatgatttgacatttgtagttatttttttgaacctagctaatatacagctgttctaaaatgttctttctgcaatgttttgtagtgatataatcatgctaaagtacatataatttgatcaaataggtttacaatacacacaactcctaaaatttgaatttattttaactatattttttaaaatatatgttattaaaactgaaataacttgtctatcaaaactgtatatatattttatattatctactataagtgttatcatattttacatgtctttatatgtattatgattcaattcacacacatttctatgtgtttcgtgatggtcaaattgaaatttaaaagactagaatctactacacgtgcattcaaatttcacacgtgagtcaattaattgaaggaaaaacaaaaacaaaagtagtatgctctatcaaaatgcagaaatattttatgttatctactataagtgtatcatattttacatgtctttataagtattatgattcaattcacacacatttctatgtgtttggcgatggtcaaattgaaatttaaaagactagaatctactacacgtgcatttaaatttgacacgtgagtcaattaattgaaggaaaaacaaaaacaaatagcttgacccaaaaaaacaaaagtgagaggctgagagtatcttttggtccgttgtcataaaaatactttcattcaacttagccgtctccttgaccatccagatacacatacgaccctatctttttgatttttacaatttagtcccttaattcttcatatattataatgtacacagagcagccacaatatatccaattttttagtcgcaccaataaatttcatatactattacgatggcatataaatatttttatttgcaatttatccccctgatttaactttattggtaatttaaaggaggcttttgaacaggcacgtgcgttaaaataatatccactagatttctctaatagagtcacattacttccacgtataagttgtcatagctatcaactcatgtacatgcaaaaacaaaaaccttaaaagctttc

SEQ ID NO: 663 - DNA, 2997 bp, Artificial Sequence; identical to SEQ ID NO: 662
  Artificial sequence
  P25116

SEQ ID NO: 664 - DNA, 1320 bp, Artificial Sequence
  Artificial sequence
  P25084
atggagagctcaaacaggagcagcaacaaccaatcacaagatgacaagcaagctcgtttccggggagttcgaagaaggccttggggaaagtttgcagcagagattcgagacccgtcgagaaacggtgcccgtctttggctcgggacatttgagaccgctgaggaggcagcaagggcttatgaccgagcagcctttaaccttaggggtcatctcgctatactcaacttccctaatgagtattatccacgtatggacgactactcgcttcgccctccttatgcttcttcttcttcgtcgtcgtcatcgggttcaacttctactaatgtgagtcgacaaaaccaaagagaagttttcgagtttgagtatttggacgataaggttcttgaagaacttcttgattcagaagaaaggaagagagcggccgctgaagctcgaaaaacaaagaaaaaaatcaaagggattcagcaagccactgcaggagtctcacaagacacttcggaaaatcctaacaaaacaatagttcctgcagcattaccacagctcacccctaccttggtgtcactgctggaggtgattgaacccgaggtgttgtatgcaggatatgatagctctgttccagattcagcatggagaattatgaccacactcaacatgttaggtgggcgtcaagtgattgcagcagtgaaatgggcaaaggcgataccaggcttcagaaacttacacctggatgaccaaatgaccctgctacagtactcatggatgtttctcatggcatttgccctgggttggagatcatacagacaatcaagtggaaacctgctctgctttgctcctgatctgattattaatgagcagagaatgtctctaccctgcatgtatgaccaatgtaaacacatgctgtttgtctcctctgaattacaaagattgcaggtatcctatgaagagtatctctgtatgaaaaccttactgcttctctcctcagttcctaaggaaggtctgaagagccaagagttatttgatgagattcgaatgacttatatcaaagagctaggaaaagccatcgtcaaaagggaagggaactccagtcagaactggcaacggttttaccaactgacaaagcttctggactccatgcatgaggtggttgagaatctccttacctactgcttccagacatttttggataagaccatgagtattgaattcccagagatgttagctgaaatcatcactaatcagataccaaaatattcaaatggaaatatcaaaaagcttctgtttcatcaaaaatctagacaggcctcgtaccggatcctctag

SEQ ID NO: 665 - DNA, 1299 bp, Artificial Sequence
  Artificial sequence
  P25095
atgaaccttgaagctcgaaaaacaaagaaaaaaatcaaagggattcagcaagccactgcaggagtctcacaagacacttcggaaaatcctaacaaaacaatagttcctgcagcattaccacagctcacccctaccttggtgtcactgctggaggtgattgaacccgaggtgttgtatgcaggatatgatagctctgttccagattcagcatggagaattatgaccacactcaacatgttaggtgggcgtcaagtgattgcagcagtgaaatgggcaaaggcgataccaggcttcagaaacttacacctggatgaccaaatgaccctgctacagtactcatggatgtttctcatggcatttgccctgggttggagatcatacagacaatcaagtggaaacctgctctgctttgctcctgatctgattattaatgagcagagaatgtctctaccctgcatgtatgaccaatgtaaacacatgctgtttgtctcctctgaattacaaagattgcaggtatcctatgaagagtatctctgtatgaaaaccttactgcttctctcctcagttcctaaggaaggtctgaagagccaagagttatttgatgagattcgaatgacttatatcaaagagctaggaaaagccatcgtcaaaagggaagggaactccagtcagaactggcaacggttttaccaactgacaaagcttctggactccatgcatgaggtggttgagaatctccttacctactgcttccagacatttttggataagaccatgagtattgaattcccagagatgttagctgaaatcatcactaatcagataccaaaatattcaaatggaaatatcaaaaagcttctgtttcatcaaaaaggtaccatggagagctcaaacaggagcagcaacaaccaatcacaagatgacaagcaagctcgtttccggggagttcgaagaaggccttggggaaagtttgcagcagagattcgagacccgtcgagaaacggtgcccgtctttggctcgggacatttgagaccgctgaggaggcagcaagggcttatgaccgagcagcctttaaccttaggggtcatctcgctatactcaacttccctaatgagtattatccacgtatggacgactactcgcttcgccctccttatgcttcttcttcttcgtcgtcgtcatcgggttcaacttctactaatgtgagtcgacaaaaccaaagagaagttttcgagtttgagtatttggacgataaggttcttgaagaacttcttgattcagaagaaaggaagagataa

SEQ ID NO: 666 - DNA, 909 bp, Artificial Sequence
  Artificial sequence
  P25093
atgcccaattttaatcaaagtgggaatattgctgatagctcattgtccttcactttcactaacagtagcaacggtccgaacctcataacaactcaaacaaattctcaagcgctttcacaaccaattgcctcctctaacgttcatgataacttcatgaataatgaaatcacggctagtaaaattgatgatggtaataattcaaaaccactgtcacctggttggacggaccaaactgcgtataacgcgtttggaatcactacagggatgtttaataccactacaatggatgatgtatataactatctattcgatgatgaagataccccaccaaacccaaaaaaagagggtaccatggagagctcaaacaggagcagcaacaaccaatcacaagatgacaagcaagctcgtttccggggagttcgaagaaggccttggggaaagtttgcagcagagattcgagacccgtcgagaaacggtgcccgtctttggctcgggacatttgagaccgctgaggaggcagcaagggcttatgaccgagcagcctttaaccttaggggtcatctcgctatactcaacttccctaatgagtattatccacgtatggacgactactcgcttcgccctccttatgcttcttcttcttcgtcgtcgtcatcgggttcaacttctactaatgtgagtcgacaaaaccaaagagaagttttcgagtttgagtatttggacgataaggttcttgaagaacttcttgattcagaagaaaggaagagataagcggccgctctagacaggcctcgtaccggatcctctagctagagctttcgttcgtatcatcggtttcgacaacgttcgtcaagttcaatgcatcagtttcattgcgcacacaccagaatcctcgagaattttgagata

SEQ ID NO: 667 - DNA, 833 bp, Artificial Sequence
  Artificial sequence
  P25083
taaggaagttcatttcatttggagaggacacgctgacaagctgactctagcagatctggtaccatggagagctcaaacaggagcagcaacaaccaatcacaagatgacaagcaagctcgtttccggggagttcgaagaaggccttggggaaagtttgcagcagagattcgagacccgtcgagaaacggtgcccgtctttggctcgggacatttgagaccgctgaggaggcagcaagggcttatgaccgagcagcctttaaccttaggggtcatctcgctatactcaacttccctaatgagtattatccacgtatggacgactactcgcttcgccctccttatgcttcttcttcttcgtcgtcgtcatcgggttcaacttctactaatgtgagtcgacaaaaccaaagagaagttttcgagtttgagtatttggacgataaggttcttgaagaacttcttgattcagaagaaaggaagagagcggccgccccaattttaatcaaagtgggaatattgctgatagctcattgtccttcactttcactaacagtagcaacggtccgaacctcataacaactcaaacaaattctcaagcgctttcacaaccaattgcctcctctaacgttcatgataacttcatgaataatgaaatcacggctagtaaaattgatgatggtaataattcaaaaccactgtcacctggttggacggaccaaactgcgtataacgcgtttggaatcactacagggatgtttaataccactacaatggatgatgtatatacctatctattcgatgatgaagataccccaccaaacccaaaaaaagagtag

SEQ ID NO: 668 - DNA, 691 bp, Artificial Sequence
  Artificial sequence
  P25438
atggagagctcaaacaggagcagcaacaaccaatcacaagatgacaagcaagctcgtttccggggagttcgaagaaggccttggggaaagtttgcagcagagattcgagacccgtcgagaaacggtgcccgtctttggctcgggacatttgagaccgctgaggaggcagcaagggcttatgaccgagcagcctttaaccttaggggtcatctcgctatactcaacttccctaatgagtattatccacgtatggacgactactcgcttcgccctccttatgcttcttcttcttcgtcgtcgtcatcgggttcaacttctactaatgtgagtcgacaaaaccaaagagcccaattttaatcaaagtgggaatattgctgatagctcattgtccttcactttcactaacagtagcaacggtccgaacctcataacaactcaaacaaattctcaagcgctttcacaaccaattgcctcctctaacgttcatgataacttcatgaataatgaaatcacggctagtaaaattgatgatggtaataattcaaaaccactgtcacctggttggacggaccaaactgcgtataacgcgtttggaatcactacagggatgtttaataccactacaatggatgatgtatataactatctattcgatgatgaagataccccaccaaacccaaaaaaagagtag

SEQ ID NO: 669 - DNA, 1161 bp, Artificial Sequence
  Artificial sequence
  P25271
atggagagctcaaacaggagcagcaacaaccaatcacaagatgacaagcaagctcgtttccggggagttcgaagaaggccttggggaaagtttgcagcagagattcgagacccgtcgagaaacggtgcccgtctttggctcgggacatttgagaccgctgaggaggcagcaagggcttatgaccgagcagcctttaaccttaggggtcatctcgctatactcaacttccctaatgagtattatccacgtatggacgactactcgcttcgccctccttatgcttcttcttcttcgtcgtcgtcatcgggttcaacttctactaatgtgagtcgacaaaaccaaagagaagttttcgagtttgagtatttggacgataaggttcttgaagaacttcttgattcagaagaaaggaagagatgcggccgcatggtgagcaagggcgaggagctgttcaccggggtggtgcccatcctggtcgagctggacggcgacgtaaacggccacaagttcagcgtgtccggcgagggcgagggcgatgccacctacggcaagctgaccctgaagttcatctgcaccaccggcaagctgcccgtgccctggcccaccctcgtgaccaccctgacctacggcgtgcagtgcttcagccgctaccccgaccacatgaagcagcacgacttcttcaagtccgccatgcccgaaggctacgtccaggagcgcaccatcttcttcaaggacgacggcaactacaagacccgcgccgaggtgaagttcgagggcgacaccctggtgaaccgcatcgagctgaagggcatcgacttcaaggaggacggcaacatcctggggcacaagctggagtacaactacaacagccacaacgtctatatcatggccgacaagcagaagaacggcatcaaggtgaacttcaagatccgccacaacatcgaggacggcagcgtgcagctcgccgaccactaccagcagaacacccccatcggcgacggccccgtgctgctgcccgacaaccactacctgagcacccagtccgccctgagcaaagaccccaacgagaagcgcgatcacatggtcctgctggagttcgtgaccgccgccgggatcactctcggcatggacgagctgtacaagtccggagggatcctctag

SEQ ID NO: 670 - DNA, 673 bp, Artificial Sequence
  Artificial sequence
  P1695
aatccatagatctcttattaaataacagtgctgaccaagctcttacaaagcaaaccaatctagaacaccaaagttaatggagagctcaaacaggagcagcaacaaccaatcacaagatgacaagcaagctcgtttccggggagttcgaagaaggccttggggaaagtttgcagcagagattcgagacccgtcgagaaacggtgcccgtctttggctcgggacatttgagaccgctgaggaggcagcaagggcttatgaccgagcagcctttaaccttaggggtcatctcgctatactcaacttccctaatgagtattatccacgtatggacgactactcgcttcgccctccttatgcttcttcttcttcgtcgtcgtcatcgggttcaacttctactaatgtgagtcgacaaaaccaaagagaagttttcgagtttgagtatttggacgataaggttcttgaagaacttcttgattcagaagaaaggaagagataatcacgattagttttgttttgatattttatgtggcactgttgtggctacctacgtgcattatgtgcatgtataggtcgcttgattagtactttataacatgcatgccacgaccataaattgtaagagaagacgtactttgcgttttcatgaaatatgaatgttagatggtttgagtac

SEQ ID NO: 671 - DNA, 348 bp, Artificial Sequence
  Artificial sequence
  P25437
atggagagctcaaacaggagcagcaacaaccaatcacaagatgacaagcaagctcgtttccggggagttcgaagaaggccttggggaaagtttgcagcagagattcgagacccgtcgagaaacggtgcccgtctttggctcgggacatttgagaccgctgaggaggcagcaagggcttatgaccgagcagcctttaaccttaggggtcatctcgctatactcaacttccctaatgagtattatccacgtatggacgactactcgcttcgccctccttatgcttcttcttcttcgtcgtcgtcatcgggttcaacttctactaatgtgagtcgacaaaaccaaagataa

SEQ ID NO: 672 - DNA, 679 bp, Artificial Sequence
  Artificial sequence
  P25738
gtcgagaatccatagatctcttattaaataacagtgctgaccaagctcttacaaagcaaaccaatctagaacaccaaagttaatggagagctcaaacaggagcagcaacaaccaatcacaagatgacaagcaagctcgtttccggggagttcgaagaaggccttggggaaagtttgcagcagagattcgagacccgtcgagaaacggtgcccgtctttggctcgggacatttgagaccgctgaggaggcagcaagggcttatgaccgagcagcctttaaccttaggggtcatctcgctatactcaacttccctaatgagtattatccacgtatggacgactactcgcttcgccctccttatgcttcttcttcttcgtcgtcgtcatcgggttcaacttctactaatgtgagtcgacaaaaccaaagagaagttttcgtgtttgagtatttggacgataaggttcttgaagaacttcttgattcagaagaaaggaagagataatcacgattagttttgttttgatattttatgtggcactgttgtggctacctacgtgcattatgtgcatgtataggtcgcttgattagtactttataacatgcatgccacgaccataaattgtaagagaagacgtactttgcgttttcatgaaatatgaatgttagatggtttgagtac

SEQ ID NO: 673 - DNA, 679 bp, Artificial Sequence
  Artificial sequence
  P25739
gtcgagaatccatagatctcttattaaataacagtgctgaccaagctcttacaaagcaaaccaatctagaacaccaaagttaatggagagctcaaacaggagcagcaacaaccaatcacaagatgacaagcaagctcgtttccggggagttcgaagaaggccttggggaaagtttgcagcagagattcgagacccgtcgagaaacggtgcccgtctttggctcgggacatttgagaccgctgaggaggcagcaagggcttatgaccgagcagcctttaaccttaggggtcatctcgctatactcaacttccctaatgagtattatccacgtatggacgactactcgcttcgccctccttatgcttcttcttcttcgtcgtcgtcatcgggttcaacttctactaatgtgagtcgacaaaaccaaagagaagttttcgagtttgagtatttgggcgataaggttcttgaagaacttcttgattcagaagaaaggaagagataatcacgattagttttgttttgatattttatgtggcactgttgtggctacctacgtgcattatgtgcatgtataggtcgcttgattagtactttataacatgcatgccacgaccataaattgtaagagaagacgtactttgcgttttcatgaaatatgaatgttagatggtttgagtac

SEQ ID NO: 674 - DNA, 679 bp, Artificial Sequence
  Artificial sequence
  P25740
gtcgagaatccatagatctcttattaaataacagtgctgaccaagctcttacaaagcaaaccaatctagaacaccaaagttaatggagagctcaaacaggagcagcaacaaccaatcacaagatgacaagcaagctcgtttccggggagttcgaagaaggccttggggaaagtttgcagcagagattcgagacccgtcgagaaacggtgcccgtctttggctcgggacatttgagaccgctgaggaggcagcaagggcttatgaccgagcagcctttaaccttaggggtcatctcgctatactcaacttccctaatgagtattatccacgtatggacgactactcgcttcgccctccttatgcttcttcttcttcgtcgtcgtcatcgggttcaacttctactaatgtgagtcgacaaaaccaaagagaagttttcgagtttgagtatttggacgataaggttggggaagaacttcttgattcagaagaaaggaagagataatcacgattagttttgttttgatattttatgtggcactgttgtggctacctacgtgcattatgtgcatgtataggtcgcttgattagtactttataacatgcatgccacgaccataaattgtaagagaagacgtactttgcgttttcatgaaatatgaatgttagatggtttgagtac

SEQ ID NO: 675 - DNA, 679 bp, Artificial Sequence
  Artificial sequence
  P25741
gtcgagaatccatagatctcttattaaataacagtgctgaccaagctcttacaaagcaaaccaatctagaacaccaaagttaatggagagctcaaacaggagcagcaacaaccaatcacaagatgacaagcaagctcgtttccggggagttcgaagaaggccttggggaaagtttgcagcagagattcgagacccgtcgagaaacggtgcccgtctttggctcgggacatttgagaccgctgaggaggcagcaagggcttatgaccgagcagcctttaaccttaggggtcatctcgctatactcaacttccctaatgagtattatccacgtatggacgactactcgcttcgccctccttatgcttcttcttcttcgtcgtcgtcatcgggttcaacttctactaatgtgagtcgacaaaaccaaagagaagttttcgagtttgagtatttggacgataaggttcttgaagaacttggggattcagaagaaaggaagagataatcacgattagttttgttttgatattttatgtggcactgttgtggctacctacgtgcattatgtgcatgtataggtcgcttgattagtactttataacatgcatgccacgaccataaattgtaagagaagacgtactttgcgttttcatgaaatatgaatgttagatggtttgagtac

SEQ ID NO: 676 - DNA, 420 bp, Artificial Sequence
  Artificial sequence
  P25446
atggatcaaggaggtcgtagcagtggtagtggaggaggaggagccgagcaagggaagtaccgtggagtaaggagacgaccttggggtaaatacgccgcggaaataagagattcgaggaagcacggagagcgtgtgtggctagggacattcgacactgcggaagacgcggctcgagcctatgaccgagccgcctattcaatgagaggcaaagctgccattctcaacttccctcacgagtattatccacgtatggacgactactcgcttcgccctccttatgcttcttcttcttcgtcgtcgtcatcgggttcaacttctactaatgtgagtcgacaaaaccaaagagaagttttcgagtttgagtatttggacgataaggttcttgaagaacttcttgattcagaagaaaggaagagataa

SEQ ID NO: 677 - DNA, 402 bp, Artificial Sequence
  Artificial sequence
  P25445
atggagagctcaaacaggagcagcaacaaccaatcacaagatgacaagcaagctcgtttccggggagttcgaagaaggccttggggaaagtttgcagcagagattcgagacccgtcgagaaacggtgcccgtctttggctcgggacatttgagaccgctgaggaggcagcaagggcttatgaccgagcagcctttaaccttaggggtcatctcgctatactcaacttccctaatgagtataacatgggaaccggatcctcatccactgcggctaattcttcttcctcgtcgcagcaagtttttgagtttgagtacttggacgatagcgttttggatgaacttcttgaatatggagagaactataacaagactcataatatcaacatgggcaagaggcaataa

SEQ ID NO: 678 - DNA, 405 bp, Artificial Sequence
  Artificial sequence
  P25448
atggatcaaggaggtcgaggtgtcggtgccgagcatggaaagtaccggggagttcggagacgaccttggggaaaatatgcagcagagatacgagattcgaggaagcacggtgaacgtgtgtggcttggaacgttcgatacggcagaggaagcggctagagcctatgaccaagctgcttactccatgagaggccaagcagcaatccttaacttccctcatgagtattatccacgtatggacgactactcgcttcgccctccttatgcttcttcttcttcgtcgtcgtcatcgggttcaacttctactaatgtgagtcgacaaaaccaaagagaagttttcgagtttgagtatttggacgataaggttcttgaagaacttcttgattcagaagaaaggaagagataa

SEQ ID NO: 679 - DNA, 411 bp, Artificial Sequence
  Artificial sequence
  P25447
atggagagctcaaacaggagcagcaacaaccaatcacaagatgacaagcaagctcgtttccggggagttcgaagaaggccttggggaaagtttgcagcagagattcgagacccgtcgagaaacggtgcccgtctttggctcgggacatttgagaccgctgaggaggcagcaagggcttatgaccgagcagcctttaaccttaggggtcatctcgctatactcaacttccctaatgagtataacatggggagtggtgtctcttcttccaccgccatggctggatcttcctccgcctccgcctccgcttcttcttcttctaggcaagtttttgaatttgagtacttggatgatagtgttttggaggagctccttgaggaaggagagaaacctaacaagggcaagaagaaatga

SEQ ID NO: 680 - DNA, 997 bp, Artificial Sequence
  Artificial sequence
  P25119
catggagagctcaaacaggagcagcaacaaccaatcacaagatgacaagcaagctcgtttccggggagttcgaagaaggccttggggaaagtttgcagcagagattcgagacccgtcgagaaacggtgcccgtctttggctcgggacatttgagaccgctgaggaggcagcaagggcttatgaccgagcagcctttaaccttaggggtcatctcgctatactcaacttccctaatgagtattatccacgtatggacgactactcgcttcgccctccttatgcttcttcttcttcgtcgtcgtcatcgggttcaacttctactaatgtgagtcgacaaaaccaaagagaagttttcgagtttgagtatttggacgataaggttcttgaagaacttcttgattcagaagaaaggaagagagcggccgctgccgctgcggcagcggccatggaaaagagaagatggaaaaagaatttcatagccgtctcagcagccaaccgctttaagaaaatctcatcctccggggcacttgattatgatattccaactactgctagcgagaatttgtattttcagggtgagctcaaaaccgcggctcttgcgcaacacgatgaagccgtggacaacaaattcaacaaagaacaacaaaacgcgttctatgagatcttacatttacctaacttaaacgaagaacaacgaaacgccttcatccaaagtttaaaagatgacccaagccaaagcgctaaccttttagcagaagctaaaaagctaaatgatgctcaggcgccgaaagtagacaacaaattcaacaaagaacaacaaaacgcgttctatgagatcttacatttacctaacttaaacgaagaacaacgaaacgccttcatccaaagtttaaaagatgacccaagccaaagcgctaaccttttagcagaagctaaaaagctaaatggtgctcaggcgccgaaagtagacgcgaattccgcggggaagtcaacctga

SEQ ID NO: 681 - DNA, 673 bp, Artificial Sequence; identical to SEQ ID NO: 670
  Artificial sequence
  P6071

SEQ ID NO: 682 - DNA, 858 bp, Artificial Sequence
  Artificial sequence
  P25118
atggagagctcaaacaggagcagcaacaaccaatcacaagatgacaagcaagctcgtttccggggagttcgaagaaggccttggggaaagtttgcagcagagattcgagacccgtcgagaaacggtgcccgtctttggctcgggacatttgagaccgctgaggaggcagcaagggcttatgaccgagcagcctttaaccttaggggtcatctcgctatactcaacttccctaatgagtattatccacgtatggacgactactcgcttcgccctccttatgcttcttcttcttcgtcgtcgtcatcgggttcaacttctactaatgtgagtcgacaaaaccaaagagaagttttcgagtttgagtatttggacgataaggttcttgaagaacttcttgattcagaagaaaggaagagagcggccgcggctgccgccgcagccgctgctagttacccatacgatgttcctgactatgcgggctatccctatgacgtcccggactatgcaggatcctatccatatgacgttccggattacgcttctagatacccatacgatgttcctgactatgcgggctatccctatgacgtcccggactatgcaggatcctatccatatgacgttccagattacgctactagttacccatacgatgttcctgactatgcgggctatccctatgacgtcccggactatgcaggatcctatccatatgacgttccagattacgcttctagatacccatacgatgttcctgactatgcgggctatccctatgacgtcccggactatgcaggatcctatccatatgacgttccagattacgctactagacaggcctcgtaccagatcctctag

SEQ ID NO: 683 - DNA, 882 bp, Artificial Sequence
  Artificial sequence
  P26259
atgagttacccatacgatgttcctgactatgcgggctatccctatgacgtcccggactatgcaggatcctatccatatgacgttccagattacgcttctagatacccatacgatgttcctgactatgcgggctatccctatgacgtcccggactatgcaggatcctatccatatgacgttccagattacgctactagttacccatacgatgttcctgactatgcgggctatccctatgacgtcccggactatgcaggatcctatccatatgacgttccagattacgcttctagatacccatacgatgttcctgactatgcgggctatccctatgacgtcccggactatgcaggatcctatccatatgacgttccagattacgctactagacaggcctcgtaccggatcctctacctagagaattccgccgctgccgctgcggcagcggctgcagcgggtaccatggagagctcaaacaggagcagcaacaaccaatcacaagatgacaagcaagctcgtttccggggagttcgaagaaggccttggggaaagtttgcagcagagattcgagacccgtcgagaaacggtgcccgtctttggctcgggacatttgagaccgctgaggaggcagcaagggcttatgaccgagcagcctttaaccttaggggtcatctcgctatactcaacttccctaatgagtattatccacgtatggacgactactcgcttcgccctccttatgcttcttcttcttcgtcgtcgtcatcgggttcaacttctactaatgtgagtcgacaaaaccaaagagaagttttcgagtttgagtatttggacgataaggttcttgaagaacttcttgattcagaagaaaggaagagataa

SEQ ID NO: 684 - DNA, 2092 bp, Artificial Sequence
  Artificial sequence
  P23402
gactcgtatccttgattcacagtatcttttctttttgttagatgtgaaaaaattccatatgaaaggttagttataaacatatacagcttttactgatatgcaatatacgtatatcttgcaaactcggatcttggatgtagaatggccgaagacatttttacgaattaaggtggattagtttcttaatattattactcactaaaatcaaagaggtttgccagaaaatatatcgtttcagttcctaaattgcttagtctaaagggaatttgtatcaaatgtggcatcgtttgaccaagattaggtttatattataatttaagggtaatctttaaaagaaactttattacgacattccacatcgaccaaattgccaaatcggagtcatgtttagaaaagtgttttgcaaacagtttgataccaattaatcatcatactgttttagaaaacacatttgactaataattgttaaaagttaccataaaagagttgactgtttagccaccaaaccctcgaagctattattagcttagtaatatctcatataaaagattcgtttttttctagatttgtttgaatgttgatattactaggttatgactagggaaactatgagtaaactaaaacataacggagcaattttttcaattaataagcgagttattaaaaattcccttgatcactgttaaaaatatgatacgaattaaaaacactgtagatgttgtactataaaaggaaaaaacaaaacactaataaaatgtttaaagatagctccggaatcagaactcatgtaacatcaactgtaaagttcgaacaaaatataatattccagttttggcaaatcagaatcccatccctcattgaaaagattaaggcaaaagagacatctcataaattaggtaaaagaaaatgcaaacataatcagacataaaaacattgatctgacatatacaagatataaagcgagatagatatatataaatcagtaattttgaacaatcttgcgttttactccatttctagagggcgagttaattatttcatttttttaatcttaatttgtaaaaagaatgaaacaaattagtaaaaagaatgaaacaaacataatttattttaagagaaatgagatgctataaaatagtatataaatatgaagtgaccaatcactttatatattatttgttactctctctctctatgtccacacaaatacttgagagtgtgaagaatcgtgaaattttggacatttttctaactcaaaatgatacgttcaactactacaccaccattagttggtttaagtctatttgcgtagcaataatttgcaagaatgatgtgctttatatatcctatacatagaaaactttaattaaattttgcttttttgttgaatataccctatatttttgacaacttgttaaagatcatttttattttcatcagttattattttaataaatacatcgtatacatgtcgttattggacgcgtaggacttacgggattgggcataattaaatggtacttaattactttggttatgctttttctattctatggactcagacctcaatatttgcgaacctatgattataatgttttagatatttttaatcactgttgtgaagatttttataatcctagaccatcgatattacgagttacaacttcttctacataagttacaattaagatcactctggagtcaaagactaattaaattttagttacataattaagaaaagttttttttttttcacaattaagaaaaggttaagatgtgcgaacaatcaaatttggtttgtgcaccacgtggaatcttcctggatgacaacaatgtatcattaatgcataaaaataacaaaaaaaaatagaaaaaaatagaaagggtattaaaggaaagaatagtcaacccaagaaggcaagaatcgtcaagtcacgtgaaaacgaacgtcgattctgactcgacgacaatccggcctcatatataaatagacagatgatactacataatccataatccatagatctcttattaaataacagtgctgaccaagctcttacaaagcaaaccaatctagaacaccaaagttagc

SEQ ID NO: 685 - DNA, 2054 bp, Artificial Sequence
  Artificial sequence
  P25115
ttagatgtgaaaaaattccatatgaaaggttagttataaacatatacagcttttactgatatgcaatatacgtatatcttgcaaactcggatcttggatgtagaatggccgaagacatttttacgaattaaggtggattagtttcttaatattattactcactaaaatcaaagaggtttgccagaaaatatatcgtttcagttcctaaattgcttagtctaaagggaatttgtatcaaatgtggcatcgtttgaccaagattaggtttatattataatttaagggtaatctttaaaagaaactttattacgacattccacatcgaccaaattgccaaatcggagtcatgtttagaaaagtgttttgcaaacagtttgataccaattaatcatcatactgttttagaaaacacatttgactaataattgttaaaagttaccataaaagagttgactgtttagccaccaaaccctcgaagctattattagcttagtaatatctcatataaaagattcgtttttttctagatttgtttgaatgttgatattactaggttatgactagggaaactatgagtaaactaaaacataacggagcaattttttcaattaataagcgagttattaaaaattcccttgatcactgttaaaaatatgatacgaattaaaaacactgtagatgttgtactataaaaggaaaaaacaaaacactaataaaatgtttaaagatagctccggaatcagaactcatgtaacatcaactgtaaagttcgaacaaaatataatattccagttttggcaaatcagaatcccatccctcattgaaaagattaaggcaaaagagacatctcataaattaggtaaaagaaaatgcaaacataatcagacataaaaacattgatctgacatatacaagatataaagcgagatagatatatataaatcagtaattttgaacaatcttgcgttttactccatttctagagggcgagttaattatttcatttttttaatcttaatttgtaaaaagaatgaaacaaattagtaaaaagaatgaaacaaacataatttattttaagagaaatgagatgctataaaatagtatataaatatgaagtgaccaatcactttatatattatttgttactctctctctctatgtccacacaaatacttgagagtgtgaagaatcgtgaaattttggacatttttctaactcaaaatgatacgttcaactactacaccaccattagttggtttaagtctatttgcgtagcaataatttgcaagaatgatgtgctttatatatcctatacatagaaaactttaattaaattttgcttttttgttgaatataccctatatttttgacaacttgttaaagatcatttttattttcatcagttattattttaataaatacatcgtatacatgtcgttattggacgcgtaggacttacgggattgggcataattaaatggtacttaattactttggttatgctttttctattctatggactcagacctcaatatttgcgaacctatgattataatgttttagatatttttaatcactgttgtgaagatttttataatcctagaccatcgatattacgagttacaacttcttctacataagttacaattaagatcactctggagtcaaagactaattaaattttagttacataattaagaaaagtttttttttttttcacaattaagaaaaggttaagatgtgcgaacaatcaaatttggtttgtgcaccacgtggaatcttcctggatgacaacaatgtatcattaatgcataaaaataacaaaaaaaaatagaaaaaaatagaaagggtattaaaggaaagaatagtcaacccaagaaggcaagaatcgtcaagtcacgtgaaaacgaacgtcgattctgactcgacgacaatccggcctcatatataaatagacagatgatactacataatccataatccatagatctcttattaaataacagtgctgaccaagctcttacaaagcaaaccaatctagaacaccaaagtta

SEQ ID NO: 686 - DNA, 2091 bp, Artificial Sequence
  Artificial sequence
  P23306
gactcgtatccttgattcacagtatcttttctttttgttagatgtgaaaaaattccatatgaaaggttagttataaacatatacagcttttactgatatgcaatatacgtatatcttgcaaactcggatcttggatgtagaatggccgaagacatttttacgaattaaggtggattagtttcttaatattattactcactaaaatcaaagaggtttgccagaaaatatatcgtttcagttcctaaattgcttagtctaaagggaatttgtatcaaatgtggcatcgtttgaccaagattaggtttatattataatttaagggtaatctttaaaagaaactttattacgacattccacatcgaccaaattgccaaatcggagtcatgtttagaaaagtgttttgcaaacagtttgataccaattaatcatcatactgttttagaaaacacatttgactaataattgttaaaagttaccataaaagagttgactgtttagccaccaaaccctcgaagctattattagcttagtaatatctcatataaaagattcgtttttttctagatttgtttgaatgttgatattactaggttatgactagggaaactatgagtaaactaaaacataacggagcaattttttcaattaataagcgagttattaaaaattcccttgatcactgttaaaaatatgatacgaattaaaaacactgtagatgttgtactataaaaggaaaaaacaaaacactaataaaatgtttaaagatagctccggaatcagaactcatgtaacatcaactgtaaagttcgaacaaaatataatattccagttttggcaaatcagaatcccatccctcattgaaaagattaaggcaaaagagacatctcataaattaggtaaaagaaaatgcaaacataatcagacataaaaacattgatctgacatatacaagatataaagcgagatagatatatataaatcagtaattttgaacaatcttgcgttttactccatttctagagggcgagttaattatttcatttttttaatcttaatttgtaaaaagaatgaaacaaattagtaaaaagaatgaaacaaacataatttattttaagagaaatgagatgctataaaatagtatataaatatgaagtgaccaatcactttatatattatttgttactctctctctctatgtccacacaaatacttgagagtgtgaagaatcgtgaaattttggacatttttctaactcaaaatgatacgttcaactactacaccaccattagttggtttaagtctatttgcgtagcaataatttgcaagaatgatgtgctttatatatcctatacatagaaaactttaattaaattttgcttttttgttgaatataccctatatttttgacaacttgttaaagatcatttttattttcatcagttattattttaataaatacatcgtatacatgtcgttattggacgcgtaggacttacgggattgggcataattaaatggtacttaattactttggttatgctttttctattctatggactcagacctcaatatttgcgaacctatgattataatgttttagatatttttaatcactgttgtgaagatttttataatcctagaccatcgatattacgagttacaacttcttctacataagttacaattaagatcactctggagtcaaagactaattaaattttagttacataattaagaaaagtttttttttttttcacaattaagaaaaggttaagatgtgcgaacaatcaaatttggtttgtgcaccacgtggaatcttcctggatgacaacaatgtatcattaatgcataaaaataacaaaaaaaaatagaaaaaaatagaaagggtattaaaggaaagaatagtcaacccaagaaggcaagaatcgtcaagtcacgtgaaaacgaacgtcgattctgactcgacgacaatccggcctcatatataaatagacagatgatactacataatccataatccatagatctcttattaaataacagtgctgaccaagctcttacaaagcaaaccaatctagaacaccaaagtta

SEQ ID NO: 687 - DNA, 1141 bp, Artificial Sequence
  Artificial sequence
  P25942
aagatataaagcgagatagatatatataaatcagtaattttgaacaatcttgcgttttactccatttctagagggcgagttaattatttcatttttttaatcttaatttgtaaaaagaatgaaacaaattagtaaaaagaatgaaacaaacataatttattttaagagaaatgagatgctataaaatagtatataaatatgaagtgaccaatcactttatatattatttgttactctctctctctatgtccacacaaatacttgagagtgtgaagaatcgtgaaattttggacatttttctaactcaaaatgatacgttcaactactacaccaccattagttggtttaagtctatttgcgtagcaataatttgcaagaatgatgtgctttatatatcctatacatagaaaactttaattaaattttgcttttttgttgaatataccctatatttttgacaacttgttaaagatcatttttattttcatcagttattattttaataaatacatcgtatacatgtcgttattggacgcgtaggacttacgggattgtgcataattaaatggtacttaattactttggttatgctttttctattctatggactcagacctcaatatttgcgaacctatgattataatgttttagatatttttaatcactgttgtgaagatttttataatcctagaccatcgatattacgagttacaacttcttctacataagttacaattaagatcactctggagtcaaagactaattaaattttagttacataattaagaaaagttttttttttttcacaattaagaaaaggttaagatgtgcgaacaatcaaatttggtttgtgcaccacgtggaatcttcctggatgacaacaatgtatcattaatgcataaaaataacaaaaaaaaatagaaaaaaatagaaagggtattaaaggaaagaatagtcaacccaagaaggcaagaatcgtcaagtcacgtgaaaacgaacgtcgattctgactcgacgacaatccggcctcatatataaatagacagatgatactacataatccataatccatagatctcttattaaataacagtgctgaccaagctcttacaaagcaaaccaatctagaacaccaaagtta

SEQ ID NO: 688 - DNA, 1141 bp, Artificial Sequence
  Artificial sequence
  P25943
aagatataaagcgagatagatctatataaatcagtaattttgaacaatcttgcgttttactccatttctagagggcgagttaattatttcatttttttaatcttaatttgtaaaaagaatgaaacaaattagtaaaaagaatgaaacaaacataatttattttaagagaaatgagatgctataaaatagtatataaatatgaagtgaccaatcactttatatattatttgttactctctctctctatgtccacacaaatacttgagagtgtgaagaatcgtgaaattttggacatttttctaactcaaaatgatacgttcaactactacaccaccattagttggtttaagtctatttgcgtagcaataatttgcaagaatgatgtgctttatatatcctatacatagaaaactttaattaaattttgcttttttgttgaatataccctatatttttgacaacttgttaaagatcatttttattttcatcagttattattttaataaatacatcgtatacatgtcgttattggacgcgtaggacttacgggattgggcataattaaatggtacttaattactttggttatgctttttctattctatggactcagacctcaatatttgcgaacctatgattataatgttttagatatttttaatcactgttgtgaagatttttataatcctagaccatcgatattacgagttacaacttcttctacataagttacaattaagatcactctggagtcaaagactaattaaattttagttacataattaagaaaagttttttttttttcacaattaagaaaaggttaagatgtgcgaacaatcaaatttggtttgtgcaccacgtggaatcttcctggatgacaacaatgtatcattaatgcataaaaataacaaaaaaaaatagaaaaaaatagaaagggtattaaaggaaagaatagtcaacccaagaaggcaagaatcgtcaagtcacgtgaaaacgaacgtcgattctgactcgacgacaatccggcctcatatataaatagacagatgatactacataatccataatccatagatctcttattaaataacagtgctgaccaagctcttacaaagcaaaccaatctagaacaccaaagtta

SEQ ID NO: 689 - DNA, 450 bp, Artificial Sequence; identical to SEQ ID NO: 223
  Artificial sequence
  P1575

SEQ ID NO: 690 - DNA, 1302 bp, Artificial Sequence
  Artificial sequence
  P25085
gtcgacatggatcaaggaggtcgaggtgtcggtgccgagcatggaaagtaccggggagttcggagacgaccttggggaaaatatgcagcagagatacgagattcgaggaagcacggtgaacgtgtgtggcttggaacgttcgatacggcagaggaagcggctagagcctatgaccaagctgcttactccatgagaggccaagcagcaatccttaacttccctcatgagtataacatggggagtggtgtctcttcttccaccgccatggctggatcttcctccgcctccgcctccgcttcttcttcttctaggcaagtttttgaatttgagtacttggatgatagtgttttggaggagctccttgaggaaggagagaaacctaacaagggcaagaagaaagcggccgctgaagctcgaaaaacaaagaaaaaaatcaaagggattcagcaagccactgcaggagtctcacaagacacttcggaaaatcctaacaaaacaatagttcctgcagcattaccacagctcacccctaccttggtgtcactgctggaggtgattgaacccgaggtgttgtatgcaggatatgatagctctgttccagattcagcatggagaattatgaccacactcaacatgttaggtgggcgtcaagtgattgcagcagtgaaatgggcaaaggcgataccaggcttcagaaacttacacctggatgaccaaatgaccctgctacagtactcatggatgtttctcatggcatttgccctgggttggagatcatacagacaatcaagtggaaacctgctctgctttgctcctgatctgattattaatgagcagagaatgtctctaccctgcatgtatgaccaatgtaaacacatgctgtttgtctcctctgaattacaaagattgcaggtatcctatgaagagtatctctgtatgaaaaccttactgcttctctcctcagttcctaaggaaggtctgaagagccaagagttatttgatgagattcgaatgacttatatcaaagagctaggaaaagccatcgtcaaaagggaagggaactccagtcagaactggcaacggttttaccaactgacaaagcttctggactccatgcatgaggtggttgagaatctccttacctactgcttccagacatttttggataagaccatgagtattgaattcccagagatgttagctgaaatcatcactaatcagataccaaaatattcaaatggaaatatcaaaaagcttctgtttcatcaaaaatctagacaggcctcgtaccggatcctctag

SEQ ID NO: 691 - DNA, 1281 bp, Artificial Sequence
  Artificial sequence
  P25096
atgaaccttgaagctcgaaaaacaaagaaaaaaatcaaagggattcagcaagccactgcaggagtctcacaagacacttcggaaaatcctaacaaaacaatagttcctgcagcattaccacagctcacccctaccttggtgtcactgctggaggtgattgaacccgaggtgttgtatgcaggatatgatagctctgttccagattcagcatggagaattatgaccacactcaacatgttaggtgggcgtcaagtgattgcagcagtgaaatgggcaaaggcgataccaggcttcagaaacttacacctggatgaccaaatgaccctgctacagtactcatggatgtttctcatggcatttgccctgggttggagatcatacagacaatcaagtggaaacctgctctgctttgctcctgatctgattattaatgagcagagaatgtctctaccctgcatgtatgaccaatgtaaacacatgctgtttgtctcctctgaattacaaagattgcaggtatcctatgaagagtatctctgtatgaaaaccttactgcttctctcctcagttcctaaggaaggtctgaagagccaagagttatttgatgagattcgaatgacttatatcaaagagctaggaaaagccatcgtcaaaagggaagggaactccagtcagaactggcaacggttttaccaactgacaaagcttctggactccatgcatgaggtggttgagaatctccttacctactgcttccagacatttttggataagaccatgagtattgaattcccagagatgttagctgaaatcatcactaatcagataccaaaatattcaaatggaaatatcaaaaagcttctgtttcatcaaaaaggtaccgtcgacatggatcaaggaggtcgaggtgtcggtgccgagcatggaaagtaccggggagttcggagacgaccttggggaaaatatgcagcagagatacgagattcgaggaagcacggtgaacgtgtgtggcttggaacgttcgatacggcagaggaagcggctagagcctatgaccaagctgcttactccatgagaggccaagcagcaatccttaacttccctcatgagtataacatggggagtggtgtctcttcttccaccgccatggctggatcttcctccgcctccgcctccgcttcttcttcttctaggcaagtttttgaatttgagtacttggatgatagtgttttggaggagctccttgaggaaggagagaaacctaacaagggcaagaagaaatga

SEQ ID NO: 692 - DNA, 451 bp, Artificial Sequence
  Artificial sequence
  P6424
acaaacacgcaaaaagtcattaatatatggatcaaggaggtcgaggtgtcggtgccgagcatggaaagtaccggggagttcggagacgaccttggggaaaatatgcagcagagatacgagattcgaggaagcacggtgaacgtgtgtggcttggaacgttcgatacggcagaggaagcggctagagcctatgaccaagctgcttactccatgagaggccaagcagcaatccttaacttccctcatgagtataacatggggagtggtgtctcttcttccaccgccatggctggatcttcctccgcctccgcctccgcttcttcttcttctaggcaagtttttgaatttgagtacttggatgatagtgttttggaggagctccttgaggaaggagagaaacctaacaagggcaagaagaaatgagcgagatataattcatgattatttctaac

SEQ ID NO: 693 - DNA, 1187 bp, Artificial Sequence
  Artificial sequence
  P8223
atttcatcacattaatttctctctatttttcttttcttacttcaatagtaatggataacactgaccgtcgtcgccgtcgtaagcaacacaaaatcgccctccatgactctgaaggtacctctctattctctatatattttctatttcctaaatccaattttattaaacatcttgaaaataaatttagttcctagctaggatcatattctctttgtatatattcgttaaaacgagggatacgtttaattacttctaaattagttacacctcgtgctgactaaaagacttatcaagattagtttctagttttaacaaaaattaatatctttttaaaaagtttatatttgtctttttttgttagtttaatattgttttgagtttaattggtttaatattgttatttgcagaagtgagcagtatcgaatgggagtttatcaacatgactgaacaagaagaagatctcatctttcgaatgtacagacttgtcggtgataggtaacaatttcttcttcttctactttttctaagattatcccagcataaaataaattttatattttagacatgtctagctaaaacaatttaatatgcaggtatatacaattttacatacgttaatttaagcatatgtactttataacatatgtacagtgtaccatgttgtaggggaagcacatggtgtccactaattttctaaaaaaagacatttaattaaagctatcacgttcattaaattatatatgtacacacatatatatagagataaaaataagaacctaatttactattcttatcagtacgtactcatgtatataaatgcttggctggctcaaaaatggaaatttttgaactgacaaattatattttattatgaaaatataaatgctaatgcttgggataaaaatgtttttttttttcttttgaattaggtgggatttgatagcaggaagagttcctggaagacaaccagaggagatagagagatattggataatgagaaacagtgaaggctttgctgataaacgacgccagcttcactcatcttcccacaaacataccaagcctcaccgtcctcgcttttctatctatccttcctagtgtttttgtttttaagccaacgaaaaaagaaaataaaaaaattataatagatgtatagtagtggttcttgttagtttgaagaattcatc

SEQ ID NO: 694 - DNA, 736 bp, Artificial Sequence
  Artificial sequence
  P1677
taggttgagattcatatatgtaaagagatcacttcttaatcttatcctaccatatcttatatacgcttaattttcctttatatatgcaaacctccacataaaaatatctcaaacccaaacacttcaaacaaaaaaaaaatggagaacaacaacaacaaccaccaacagccaccgaaagataacgagcaactaaagagtttctggtcaaaggggatggaaggtgacttgaatgtcaagaatcacgagttccccatctctcgtatcaagaggataatgaagtttgatccggatgtgagtatgatcgctgctgaggctccaaatctcttatctaaggcttgtgaaatgtttgtcatggacctcacgatgcgttcatggctccatgctcaagagagcaaccgactcacgatacggaaatctgatgttgatgccgtagtgtctcaaaccgtcatctttgatttcttgcgtgatgatgtccctaaggacgagggagagcccgttgtcgccgctgctgatcctgtggacgatgttgctgatcatgtggctgtgccagatcttaacaatgaagaactgccgccgggaacggtgataggaactccggtttgttacggtttaggaatacacgcgccacacccgcagatgcctggagcttggaccgaggaggatgcgactggggcaaatggaggaaacggtgggaattaatatttggattgggttttgtaaccgctgttgtgagaac

SEQ ID NO: 695 - DNA, 1305 bp, Artificial Sequence
  Artificial sequence
  P26159
atggagaacaacaacaacaaccaccaacagccaccgaaagataacgagcaactaaagagtttctggtcaaaggggatggaaggtgacttgaatgtcaagaatcacgagttccccatctctcgtatcaagaggataatgaagtttgatccggatgtgagtatgatcgctgctgaggctccaaatctcttatctaaggcttgtgaaatgtttgtcatggacctcacgatgcgttcatggctccatgctcaagagagcaaccgactcacgatacggaaatctgatgttgatgccgtagtgtctcaaaccgtcatctttgatttcttgcgtgatgatgtccctaaggacgagggagagcccgttgtcgccgctgctgatcctgtggacgatgttgctgatcatgtggctgtgccagatcttaacaatgaagaactgccgccgggaacggtgataggaactccggtttgttacggtttaggaatacacgcgccacacccgcagatgcctggagcttggaccgaggaggatgcgactggggcaaatggaggaaacggtgggaatgcggccgctgccgctgcggcagcggccatggtgagcaagggcgaggagctgttcaccggggtggtgcccatcctggtcgagctggacggcgacgtaaacggccacaagttcagcgtgtccggcgagggcgagggcgatgccacctacggcaagctgaccctgaagttcatctgcaccaccggcaagctgcccgtgccctggcccaccctcgtgaccaccttcggctacggcctgcagtgcttcgcccgctaccccgaccacatgaagcagcacgacttcttcaagtccgccatgcccgaaggctacgtccaggagcgcaccatcttcttcaaggacgacggcaactacaagacccgcgccgaggtgaagttcgagggcgacaccctggataaccgaatcgagctgaagggcatcgacttcaaggaggacggcaacatcctggggcacaagctggagtacaactacaacagccacaacgtctatatcatggccgacaagcagaagaacggcatcaaggtgaacttcaagatccgccacaacatcgaggacggcagcgtgcagctcgccgaccactaccagcagaacacccccatcggcgacggccccgtggtgctgcccgacaaccactacctgagctaccagtccgccctgagcaaagaccccaacgagaagcgcgatcacatggtcctgctggagttcgtgaccgccgccgggatcactctcggcatggacgagctgtacaagtaa

SEQ ID NO: 696 - DNA, 800 bp, Artificial Sequence
  Artificial sequence
  P1285
aatagttgggctgatttcgtagcccacttaatcagcctttaaatatggaaaccctagcctagaaagtgaacaagaaaaacgtaaagatcaaaatggaagagaacaacggcaacaacaaccactacctgccgcaaccatcgtcttcccaactgccgccgccaccattgtattatcaatcaatgccgttgccgtcatattcactgccgctgccgtactcaccgcagatgcggaattattggattgcgcagatgggaaacgcaactgatgttaagcatcatgcgtttccactaaccaggataaagaaaatcatgaagtccaacccggaagtgaacatggtcactgcagaggctccggtccttatatcgaaggcctgtgagatgctcattcttgatctcacaatgcgatcgtggcttcataccgtggagggcggtcgccaaactctcaagagatccgatacgctcacgagatccgatatctccgccgcaacgactcgtagtttcaaatttaccttccttggcgacgttgtcccaagagacccttccgtcgttaccgatgatcccgtgctacatccggacggtgaagtacttcctccgggaacggtgataggatatccggtgtttgattgtaatggtgtgtacgcgtcaccgccacagatgcaggagtggccggcggtgcctggtgacggagaggaggcagctggggaaattggaggaagcagcggcggtaattgaaaagtgttgattgggttttagggttgtaatgcttttgtgagaatttgtatctctatggagtcatgtttg

SEQ ID NO: 697 - DNA, 1383 bp, Artificial Sequence
  Artificial sequence
  P26065
atggaagagaacaacggcaacaacaaccactacctgccgcaaccatcgtcttcccaactgccgccgccaccattgtattatcaatcaatgccgttgccgtcatattcactgccgctgccgtactcaccgcagatgcggaattattggattgcgcagatgggaaacgcaactgatgttaagcatcatgcgtttccactaaccaggataaagaaaatcatgaagtccaacccggaagtgaacatggtcactgcagaggctccggtccttatatcgaaggcctgtgagatgctcattcttgatctcacaatgcgatcgtggcttcataccgtggagggcggtcgccaaactctcaagagatccgatacgctcacgagatccgatatctccgccgcaacgactcgtagtttcaaatttaccttccttggcgacgttgtcccaagagacccttccgtcgttaccgatgatcccgtgctacatccggacggtgaagtacttcctccgggaacggtgataggatatccggtgtttgattgtaatggtgtgtacgcgtcaccgccacagatgcaggagtggccggcggtgcctggtgacggagaggaggcagctggggaaattggaggaagcagcggcggtaatgcggccgctgccgctgcggcagcggccatggtgagcaagggcgaggagctgttcaccggggtggtgcccatcctggtcgagctggacggcgacgtaaacggccacaagttcagcgtgtccggcgagggcgagggcgatgccacctacggcaagctgaccctgaagttcatctgcaccaccggcaagctgcccgtgccctggcccaccctcgtgaccaccttcggctacggcctgcagtgcttcgcccgctaccccgaccacatgaagcagcacgacttcttcaagtccgccatgcccgaaggctacgtccaggagcgcaccatcttcttcaaggacgacggcaactacaagacccgcgccgaggtgaagttcgagggcgacaccctggataaccgaatcgagctgaagggcatcgacttcaaggaggacggcaacatcctggggcacaagctggagtacaactacaacagccacaacgtctatatcatggccgacaagcagaagaacggcatcaaggtgaacttcaagatccgccacaacatcgaggacggcagcgtgcagctcgccgaccactaccagcagaacacccccatcggcgacggccccgtggtgctgcccgacaaccactacctgagctaccagtccgccctgagcaaagaccccaacgagaagcgcgatcacatggtcctgctggagttcgtgaccgccgccgggatcactctcggcatggacgagctgtacaagtaa

SEQ ID NO: 698 - DNA, 734 bp, Artificial Sequence
  Artificial sequence
  P1284
tctcacttccaacatccaaatccctagaaattgtaaatggctgagaacaacaacaacaacggcgacaacatgaacaacgacaaccaccagcaaccaccgtcgtactcgcagctgccgccgatggcatcatccaaccctcagttacgtaattactggattgagcagatggaaaccgtctcggatttcaaaaaccgtcagcttccattggctcgaattaagaagatcatgaaggctgatccagatgtgcacatggtctccgcagaggctccgatcatcttcgcaaaggcttgcgaaatgttcatcgttgatctcacgatgcggtcgtggctcaaagccgaggagaacaaacgccacacgcttcagaaatcggatatctccaacgcagtggctagctctttcacctacgatttccttcttgatgttgtccctaaggacgagtctatcgccaccgctgatcctggctttgtggctatgccacatcctgacggtggaggagtaccgcaatattattatccaccgggagtggtgatgggaactcctatggttggtagtggaatgtacgcgccatcgcaggcgtggccagcagcggctggtgacggggaggatgatgctgaggataatggaggaaacggcggcggaaattgaagtgtagatttagggtttgtaaccgcctatgtgggaaatttgaaatttggtggtgtttattagggttcttcaattcgtcggatttgctt

SEQ ID NO: 699 - DNA, 1353 bp, Artificial Sequence
  Artificial sequence
  P26064
atggctgagaacaacaacaacaacggcgacaacatgaacaacgacaaccaccagcaaccaccgtcgtactcgcagctgccgccgatggcatcatccaaccctcagttacgtaattactggattgagcagatggaaaccgtctcggatttcaaaaaccgtcagcttccattggctcgaattaagaagatcatgaaggctgatccagatgtgcacatggtctccgcagaggctccgatcatcttcgcaaaggcttgcgaaatgttcatcgttgatctcacgatgcggtcgtggctcaaagccgaggagaacaaacgccacacgcttcagaaatcggatatctccaacgcagtggctagctctttcacctacgatttccttcttgatgttgtccctaaggacgagtctatcgccaccgctgatcctggctttgtggctatgccacatcctgacggtggaggagtaccgcaatattattatccaccgggagtggtgatgggaactcctatggttggtagtggaatgtacgcgccatcgcaggcgtggccagcagcggctggtgacggggaggatgatgctgaggataatggaggaaacggcggcggaaatgcggccgctgccgctgcggcagcggccatggtgagcaagggcgaggagctgttcaccggggtggtgcccatcctggtcgagctggacggcgacgtaaacggccacaagttcagcgtgtccggcgagggcgagggcgatgccacctacggcaagctgaccctgaagttcatctgcaccaccggcaagctgcccgtgccctggcccaccctcgtgaccaccttcggctacggcctgcagtgcttcgcccgctaccccgaccacatgaagcagcacgacttcttcaagtccgccatgcccgaaggctacgtccaggagcgcaccatcttcttcaaggacgacggcaactacaagacccgcgccgaggtgaagttcgagggcgacaccctggataaccgaatcgagctgaagggcatcgacttcaaggaggacggcaacatcctggggcacaagctggagtacaactacaacagccacaacgtctatatcatggccgacaagcagaagaacggcatcaaggtgaacttcaagatccgccacaacatcgaggacggcagcgtgcagctcgccgaccactaccagcagaacacccccatcggcgacggccccgtggtgctgcccgacaaccactacctgagctaccagtccgccctgagcaaagaccccaacgagaagcgcgatcacatggtcctgctggagttcgtgaccgccgccgggatcactctcggcatggacgagctgtacaagtaa

SEQ ID NO: 700 - DNA, 734 bp, Artificial Sequence; identical to SEQ ID NO: 698
  Artificial sequence
  P3372

SEQ ID NO: 701 - DNA, 1362 bp, Artificial Sequence
  Artificial sequence
  P26037
atggcagagggcagtatgcgtcctccagaattcaaccagcctaacaaaaccagtaatggtggtgaggaggagtgcacggtgagggagcaagacaggttcatgcctattgccaacgtgatacggatcatgcggaggatcttacctgctcacgccaagatctcagatgactccaaggagacgatccaagagtgtgtttcggagtacatcagcttcataacaggggaggctaatgagcggtgccagcgggaacagcgcaagaccatcactgctgaggacgtcttgtgggcaatgagcaagctcggttttgatgactacatcgaacccctcacgttgtacctccaccgctacagagagttggaaggtgaaagaggggttagctgcagtgctgggtccgttagtatgaccaacggcttggtggtcaagaggcctaatgggaccatgaccgagtatggagcctacgggcctgtgccagggattcacatggcgcagtaccattatcgtcatcagaacgggtttgttttcagtggtaacgaacctaattctaagatgagtggttcatcttcaggagcaagtggcgccagagttgaagtatttccgactcaacaacataagtacgcggccgctgccgctgcggcagcggccatggtgagcaagggcgaggagctgttcaccggggtggtgcccatcctggtcgagctggacggcgacgtaaacggccacaagttcagcgtgtccggcgagggcgagggcgatgccacctacggcaagctgaccctgaagttcatctgcaccaccggcaagctgcccgtgccctggcccaccctcgtgaccaccctgacctggggcgtgcagtgcttcagccgctaccccgaccacatgaagcagcacgacttcttcaagtccgccatgcccgaaggctacgtccaggagcgcaccatcttcttcaaggacgacggcaactacaagacccgcgccgaggtgaagttcgagggcgacaccctggtgaaccgcatcgagctgaagggcatcgacttcaaggaggacggcaacatcctggggcacaagctggagtacaactacatcagccacaacgtctatatcaccgccgacaagcagaagaacggcatcaaggccaacttcaagatccgccacaacatcgaggacggcagcgtgcagctcgccgaccactaccagcagaacacccccatcggcgacggccccgtgctgctgcccgacaaccactacctgagcacccagtccgccctgagcaaagaccccaacgagaagcgcgatcacatggtcctgctggagttcgtgaccgccgccgggatcactctcggcatggacgagctgtacaagtaa

SEQ ID NO: 702 - DNA, 1308 bp, Artificial Sequence
  Artificial sequence
  P26052
atggagaacaacaacggcaacaaccagctgccaccgaaaggtaacgagcaactgaagagtttctggtcaaaagagatggaaggtaacttagatttcaaaaatcacgaccttcctataactcgtatcaagaagattatgaagtatgatccggatgtgactatgatagctagtgaggctccaatcctcctctcgaaagcatgtgagatgtttatcatggatctcacgatgcgttcgtggctccatgctcaggaaagcaaacgagtcacgctacagaaatctaatgtcgatgccgcagtggctcaaactgttatctttgatttcttgcttgatgatgacattgaggtaaagagagagtctgttgccgccgctgctgatcctgtggccatgccacctattgacgatggagagctgcctccaggaatggtaattggaactcctgtttgttgtagtcttggaatccaccaaccacaaccacaaatgcaggcatggcctggagcttggacctcggtgtctggtgaggaggaagaagcgcgtgggaaaaaaggaggtgacgacggaaacgcggccgctgccgctgcggcagcggccatggtgagcaagggcgaggagctgttcaccggggtggtgcccatcctggtcgagctggacggcgacgtaaacggccacaagttcagcgtgtccggcgagggcgagggcgatgccacctacggcaagctgaccctgaagttcatctgcaccaccggcaagctgcccgtgccctggcccaccctcgtgaccaccttcggctacggcctgcagtgcttcgcccgctaccccgaccacatgaagcagcacgacttcttcaagtccgccatgcccgaaggctacgtccaggagcgcaccatcttcttcaaggacgacggcaactacaagacccgcgccgaggtgaagttcgagggcgacaccctggataaccgaatcgagctgaagggcatcgacttcaaggaggacggcaacatcctggggcacaagctggagtacaactacaacagccacaacgtctatatcatggccgacaagcagaagaacggcatcaaggtgaacttcaagatccgccacaacatcgaggacggcagcgtgcagctcgccgaccactaccagcagaacacccccatcggcgacggccccgtggtgctgcccgacaaccactacctgagctaccagtccgccctgagcaaagaccccaacgagaagcgcgatcacatggtcctgctggagttcgtgaccgccgccgggatcactctcggcatggacgagctgtacaagtaa

SEQ ID NO: 703 - DNA, 668 bp, Artificial Sequence; identical to SEQ ID NO: 47
  Artificial sequence
  P3603

SEQ ID NO: 704 - DNA, 1749 bp, Artificial Sequence
  Artificial sequence
  P1581
tctctagctctttactaatttatcgatttgtctttctgatttttgttttgtcattttcaagaaaacaatggagtacgatggacggagaccctactctgttctaacgagaaatgaaattaccgtaaagatgaagaaacagatcaatgaaatctctgacatcttcttcatatcaaactccgatgcgaccgtacttcttatgtatctccgatgggactcgcttcgtgtttcagagcgtttaggtgaaaacaaggagaaattattgatggattcaggtttgaaatcagtcatgatcgatcccagtccagattcatctagcgagattagcttggagactgatgtttatgagtttgatggtgataatgatttaatctccatgcccttttgttctcacaagttcgactcaaaatattggagagagtatcttgagaagaatttctactatgtggagaaaatccaaaccacaatctcttgtcctgatcaagattgtcgatctgcggttggaccagacacgattgagaaactaacagtacgtgatcaagagatgtacgagaggtacatttggagatcttacattgaaggaaacaaggtattgatgatcaaacagtgtcctgcacggaattgcgattatgttattgagtttcatcaagagaatgatgatgatgatgagtatagtttaaacgtggtgtgtatctgtggtcatatcttctgttggagatgcagacttgagtcacacagaccagtgagttgtaacaaggcctctgattggttgtgtagtgccacaatgaaaatatcagatgaatcatttagcctttatccgaccaaaaccaagacagtgacttgccctcattgcctctgttctctggagtctgatacaaaaatgccccagttcttgacttgtgtctgcaggtttcaccctaattttgacaattacatagaattggatttctctgtttaagtcttgatccttactcttttgtgttatcttgctttaggcttcgtttctgttcgaggtgtttgcggtcagaggaagcccacaaaattgaagcagtagactctggattctgtattaaaacagaagtggggattttatgtgaggatcgctggaacgtgtgtcagaagttactggagcaagccaaatccgatctagaagctttcgaggaaaccaacatcaagaaaccgagtgacttattaagggagcaagacattatgattataagagaagggttgatgttgattgttcaatgcagacgagtccttaaatggtgttgtgtgtatgactatttccacacagagtatgagaactcgaaggagtatctacgatacctccaaggaaatgcaatcgccacgctccagagttactcaaacactttacaagagcaaaaagatatcgtcctcgctgcagctacttatgaagagtgtactttcttcagacatacgatacctactgcgacaagcaacattggtaactacttttatgattttatgaaaactttacaagatggtttggtcgatgtaaaggtgaagtcatacaacggcgggactggtcctttctggtactgtgatcgctgcacgtatgcaaacacttgggaggataatgagtgtgagatgtgctatgatgatagtgcctctcttgtgggagagataagtgatttgtttcttaacaaagtttcttaaaaacacgagggaggcatgaaactttcaacttgtatattttacaattgttttgctctgcaatataataatcgagac

SEQ ID NO: 705 - DNA, 1727 bp, Artificial Sequence
  Artificial sequence
  P2029
ctcgttgaccccgatcgagatggttgattcttctcgtgattcgtgtttcaaagctggtaagtttagtgctccaggttttcgatttcaccctactgatgaagagcttgtggtttattatcttaagaggaagatctgttgtaaaaaacttcgagtcaatgccattggtgtcgttgatgtttacaaagtcgatccttctgaattgcctggtctatcgatgttgaagacgggagatagacagtggttctttttcactccaaggaataggaagtatcctaacgcagctaggtcaagtagaggtactgcaactggttattggaaggcgacaggaaaggatcgagtcattgagtacaattcaagatctgttggactcaagaagactcttgttttctatagaggtcgtgctcctaatggtgagagaactgactgggtgatgcatgagtacactatggatgaagaagagctagggagatgtaagaacgctaaggagtattatgctctttataagctttataagaagagtggggctggtcctaagaatggtgaacagtatggtgctccgttccaagaagaagaatgggttgatagtgatagtgaagatgcagatagtgtcgctgtaccggattatcccgtggtccgttatgagaatggtccttgtgtggatgatactaaattttgcaatcctgtcaaacttcagttagaggatattgagaagcttctcaatgaaatcccagatgcacccggggttaaccaaagacagtttgatgagtttgttggtgttccacagggtaatagtgcagaagtgatacagagcacattgctgaataattcttctggagagtatattgaccctcggacgaatggaatgttcttgccaaatggccagctatacaacagggactcgagttttcagtcccatttgaattcatttgaggctacctctggtatggcacctcttctagataatgagaaggaggagtacattgaaatgaatgatcttctgatccctgagctcggtgcttcttcaacagagaaatccacagagttcttgaaccatggtgaatttggtgatgttaatgaatacgaccaattgttcaatgacatatctgtttttcagggaacttctacagatctgtcttgtctgagtaattttactaataacacatcaggccaaagacagcaattactttatgaacagttccagtaccagacacctgagaaccagcttaataactacatgcatcctagtaccactcttaatcagttcactgacaatatgtggtttaaagatgatcaggctgctctctatgttcaaccaccacaatcttcttctggagcattcacttcacagtcaacaggtgtgatgcctgagtctatgaatcccactatgagtgtaaatccccaatacaaggaaggacaaaatggtggtggaacaaggagccagttctcatcagctctgtgggaattattggaatcaataccatcaacaccagcctctgcctgtgagggtcctcttaaccagacctttgtgcgtatgtctagcttcagccgcatcaggttcaatggaacgtcagtgactagtagaaaagtcactgtagcaaagaagcgtatcagtaacagaggttttcttctgttatcaattatgggtgctttgtgtgctatcttctgggtgttcaaagccaccgttggagttatgggaagacctctcttgtcgtgaacctagactcttg

SEQ ID NO: 706 - DNA, 1163 bp, Artificial Sequence
  Artificial sequence
  P1310
acattcacattactaatctctcaagatttcacaattttcttgtgattttctctcagtttcttatttcgtttcataacatggatgccatgagtagcgtagacgagagctctacaactacagattccattccggcgagaaagtcatcgtctccggcgagtttactatatagaatgggaagcggaacaagcgtggtacttgattcagagaacggtgtcgaagtcgaagtcgaagccgaatcaagaaagcttccttcttcaagattcaaaggtgttgttcctcaaccaaatggaagatggggagctcagatttacgagaaacatcaacgcgtgtggcttggtactttcaacgaggaagacgaagcagctcgtgcttacgacgtcgcggctcaccgtttccgtggccgcgatgccgttactaatttcaaagacacgacgttcgaagaagaggttgagttcttaaacgcgcattcgaaatcagagatcgtagatatgttgagaaaacacacttacaaagaagagttagaccaaaggaaacgtaaccgtgacggtaacggaaaagagacgacggcgtttgctttggcttcgatggtggttatgacggggtttaaaacggcggagttactgtttgagaaaacggtaacgccaagtgacgtcgggaaactaaaccgtttagttataccaaaacaccaagcggagaaacattttccgttaccgttaggtaataataacgtctccgttaaaggtatgctgttgaatttcgaagacgttaacgggaaagtgtggaggttccgttactcttattggaatagtagtcaaagttatgtgttgaccaaaggttggagtagattcgttaaagagaagagactttgtgctggtgatttgatcagttttaaaagatccaacgatcaagatcaaaaattctttatcgggtggaaatcgaaatccgggttggatctagagacgggtcgggttatgagattgtttggggttgatatttctttaaacgccgtcgttgtagtgaaggaaacaacggaggtgttaatgtcgtcgttaaggtgtaagaagcaacgagttttgtaataacaatttaacaacttgggaaagaaaaaaaagctttttgattttaatttctcttcaacgttaatcttgctgagattatttatg

SEQ ID NO: 707 - DNA, 1160 bp, Artificial Sequence
  Artificial sequence
  P3373
attcacattactaatctctcaagatttcacaattttcttgtgattttctctcagtttcttatttcgtttcataacatggatgccatgagtagcgtagacgagagctctacaactacagattccattccggcgagaaagtcatcgtctccggcgagtttactatatagaatgggaagcggaacaagcgtggtacttgattcagagaacggtgtcgaagtcgaagtcgaagccgaatcaagaaagcttccttcttcaagattcaaaggtgttgttcctcaaccaaatggaagatggggagctcagatttacgagaaacatcaacgcgtgtggcttggtactttcaacgaggaagacgaagcagctcgtgcttacgacgtcgcggctcaccgtttccgtggccgcgatgccgttactaatttcaaagacacgacgttcgaagaagaggttgagttcttaaacgcgcattcgaaatcagagatcgtagatatgttgagaaaacacacttacaaagaagagttagaccaaaggaaacgtaaccgtgacggtaacggaaaagagacgacggcgtttgctttggcttcgatggtggttatgacggggtttaaaacggcggagttactgtttgagaaaacggtaacgccaagtgacgtcgggaaactaaaccgtttagttataccaaaacaccaagcggagaaacattttccgttaccgttaggtaataataacgtctccgttaaaggtatgctgttgaatttcgaagacgttaacgggaaagtgtggaggttccgttactcttattggaatagtagtcaaagttatgtgttgaccaaaggttggagtagattcgttaaagagaagagactttgtgctggtgatttgatcagttttaaaagatccaacgatcaagatcaaaaattctttatcgggtggaaatcgaaatccgggttggatctagagacgggtcgggttatgagattgtttggggttgatatttctttaaacgccgtcgttgtagtgaaggaaacaacggaggtgttaatgtcgtcgttaaggtgtaagaagcaacgagttttgtaataacaatttaacaacttgggaaagaaaaaaaagctttttgattttaatttctcttcaacgttaatcttgctgagattatttat

SEQ ID NO: 708 - DNA, 583 bp, Artificial Sequence
  Artificial sequence
  P1278
ctccaacaaaccatctttataagactccaaaatggagggtaagagatcacaaggacaaggttacatgaaaaagaagtcttaccttgtggaagaagatatggagactgatacggatgaagaagaggaagtaggtagggatagagttagagggtctagaggtagcatcaatcgtggtggctcgttgcggctttgccaagtagatagatgcacagctgatatgaaagaggcaaaactgtatcaccggagacacaaagtgtgtgaagttcatgcaaaggcatcttctgtctttctctcaggacttaaccaacgcttttgtcaacaatgcagtaggtttcatgacctccaagagtttgatgaagctaagagaagttgcaggaggcgcttagctggacacaatgagcgaagaaggaagagctctggtgagagtacttatggagaaggatcaggtcggagaggaatcaatggtcaggtggtgatgcagaatcaagaaagatcaagggtagagatgacacttcctatgccaaactcatcattcaagcgaccacagattagatagagaagctgttctgctctctctcttctg

SEQ ID NO: 709 - DNA, 1042 bp, Artificial Sequence
  Artificial sequence
  P2032
atggagaatccggtgggtttaagattccgtccgaccgacaaggagatcgtcgtcgattacctccgaccaaaaaactccgatagggacacgagtcatgttgatcgagtcattagcacagtcactatccgtagcttcgacccttgggagttaccttgccagtctaggatcaaactgaaagatgagtcttggtgtttcttcagccctaaggagaacaaatatggcagaggtgatcaacaaattagaaaaacgaaatctggttactggaagattactggcaaaccaaagcctatcttgcgtaaccgccaagagatcggtgagaaaaaggttttgatgttttacatgagtaaggaacttggtggatccaaatccgactgggttatgcacgagtaccatgctttctctcctactcagatgatgatgacatatacaatatgtaaagttatgtttaagggtgacgtgagagagatttcttcttcttctgcttcttatggtagtgaaattgagcagagtcgtgactctttaatccctcttcttgtgaacgattctgaggaagaagctcaaatcgaggatgctataccaatagaggaatgggaaacatggttgactgatgatggtgttgatgagcaggtgaatcatattatgaatatgaaagatgatcgcaacaaccacaggcctcaaaagccattgactggtgtcttgattgacgatagtagtgatgatgatgatgattctgatttgctatctccaacaacaaattctattgaaaattcgagcacttgtgatagttttggtagctcagaccaaatcaacttagtgtcactaactcaagaggtgagccaagctctgataaccagtattgatacacccgagaagattaagagtccttatgatgatgcacaagggactggggctggagggcaaaaattgggtcaagagactcgagagaagaaacgagctggtttctttcacaggatgatacaaatattcgtcaagaaaattcaccaatgttcttctatctcaagaacataatagcagtaaatga

SEQ ID NO: 710 - DNA, 765 bp, Artificial Sequence; identical to SEQ ID NO: 405
  Artificial sequence
  P1507

SEQ ID NO: 711 - DNA, 485 bp, Artificial Sequence; identical to SEQ ID NO: 175
  Artificial sequence
  P1572

SEQ ID NO: 712 - DNA, 485 bp, Artificial Sequence; identical to SEQ ID NO: 175
  Artificial sequence
  P4361

SEQ ID NO: 713 - DNA, 1207 bp, Artificial Sequence
  Artificial sequence
  P25132
ccatgtaatagtatatagagatggctttgctctgtctttctttgtgtttaccccttatacgagatattctttcttctccttgagttcaaattataatcttcaagctttcccactatcttttgtatttgacatacaacacctcatatttgattgggtgaaacaaaaacgagagaaaatttcaataaccatgctaggccacttggactatatagtcttcatttctattcatttctattcattttatgatttttgttcaattagcaatataggcatacataatcttttttttaataaataaattaactctaagaatttggaaaatattattaagtttatgagataatgtatgttaaatgtaaaaataacatataatataaacctcttaaccataatttttttattaaaagaagaaagggaggtcattgtagagactagagagtacattgcattcaaatttggttgctcaaaagtgagtgattccgtgtgcggaatcttagtttgtgttaaatttgagtaccaccaatcaaagaagagaccacaaatctcatatcccttttcgttttcagtgtgcaaattgcaaaacgagacaagacaaaaaataacttttctgccctttagtcaaacttataagcccaagaagagcacccgtttaagactatttgaagacgtcatgcctgatgaaattaaccaaacaaaataagagagagaggcaagtctcatgttttcttttcaagtttcagcacgtgatgtcgtgatggactgttgtgtacttgtgtgttttttaattttcttttctatcagactttttgaatcaagtcgtattgatgatatggatcatcaggtgatatgatgactctcattacgttggaaaattcatttgtttatccaaatgggtatttagttgatgtaaacctcaacaagttgaaacttgaaacacgactcgaatattccaaagaacccaaaagctaaaactaaaatagaaaacgtcaaccagtgcgagccacatgtccatatctcataacccccccggtcatactttgaccatatattatttgtttattcatctcataacccaattttaaaagtacaatttatatacattcaatttattcggacttgatctacacgactttattccgcttcaacgtatttatatgcaacattttccctcatgatcttataatctcatcttcatccacccaaaaac

SEQ ID NO: 714 - DNA, 1207 bp, Artificial Sequence; identical to SEQ ID NO: 713
  Artificial sequence
  P25133

SEQ ID NO: 715 - DNA, 2869 bp, Artificial Sequence
  Artificial sequence
  P2065
tgtgacatccaacgaatagccaatcgctgaaaagtgaagactttttgttaccccataaacaaaagcatcatctctctctcatcttttatttttcttttagaaaccaaacttttcagatttctctctctccatttggcgatagaagaagtcatgtaccaatcatcatcctccacgtcatcatcatcgcagagatcatcgcttcccggcggcggaggactgatccgttacggctcagctccgggatcgtttctaaactctgtggttgacgaagtcatcggaggaggctcatcaaacgctcgtgacttcaccggctatcaaccgtcgtcggataacttcatcggtaactttttcaccggagctgctgactcatcctcgctgagatccgattcgacgacttgtggagtcaacaactcatccgacggacagaaacagctaggcaataacaataataataatagtaataaagatatcttcctcgacagatcctacggtggattcaacgagatctcgcaacaacacaagagcaacgacatcggaggaggaaacagctcaggatcttactctctcgctagacaacgtagctctcccgccgatttcttcacctacctcgcctcagataaaaacagttagtcctttttttactcaagaatagtaactgtgatgagatatatatatttagacagacaagtttactcattttcagaccatttttccttagaatttgccaaaaatcgtaatgtagaatatgagctatatagttttcagtcattcaatcattcattgctcaactaaagatccgttttttggtgaaatgaaaatctaaccacgagggtattttcggtatttctcactgtgaagtatctagtttcttacaagttaattaacgactatgtatataaaataagttgacattgtgagctttgatatttagggtcgttgctaaattagcttggttggtacttgtgcaagacgtgatcctcgtattttcggaatgacgaaaataccatttgatccctaaccacgtgcttgaaaatacagcaaaaatgtggctcggttacccttaatttgggatattatttaaatcttcgaggattcctatatctcaagttgcatttatttatttagaggatggattttttcgttgatgaccaatagtttctctgctgagatggcgaaatatcattggttgtgatgaagattattcaaatagaaagcgatgtagatctagttggtggatctgatctgtccacttttatattattttttccttggtcctgatgattcgtgctttgcttcgttgttatctaatcataatatcttccaccaagcctggatgtgacttcccacacctaaccggtcaccggcctgaaccggaattcaactatccatattatccaaaaatccctctttatttacttacattatatggtttctaatattttggatgtgaatgtgaattatttttaaaaataattttcacgtaatgtcattataatatagtttactttgtaaatcagatttctcgttgaaccaaccaaccagtgattatagtccgcaaggagggtctaatgggggacgaggacattccagattgaagtctcagctaagcttcacgaatcacgactctctggctcggatcaacgaggtcaatgagaccccagtccacgacggttcaggccattcgttttctgcggctagctttggtgcagccactactgattcttgggatgacggttccggttcgatagggtttaccgtgactaggcccagtaaacgatccaaggacatggactctggtctcttttcgcaggtacaatttatttgtttccatgtgggattcctttttttttttcttcatgtgttattactataaacatgctactttagtcaaattatatgaaatttcaaaatttctagaaaaggacaaaaaaatgtaaaatatttgttttaggatagacataaaaaaaaaaattaactagtaaaggtaaatgcagcaaaactctttagtggccatacatttttgttggtggccaattcttaccgaatatttttatcactggttttgcagtatagtcttccttcagacacttcaatgaactacatggataacttcatgcagcttccagaagattctgtaccctgcaaaatccgggccaaacgcggctgcgccacccatcctagaagcatcgctgagcgggtcagttataaacactttttaatttatttagcgatggataattaattcactaaatttagcaacaaatttgatcgtccctaatcatgtagaccctattctttttgccatcctcctatcttaacctatacaatatgtttatattataggagaggagaacgagaataagtgggaagctaaagaagctacaagatcttgtccccaacatggataaggttactttatatcaaatatatatagtatatatggtaacatcattttgaaaaagtgttcattacctcacacacttgttgctgattttcttagcaaacaagctattcagacatgctggatttagctgtacaacacatcaaaggccttcagcatcaacttcaggttcccttatcttactttttctgtttaggtcagctgaatccatttccagagttctctctagttcatgatccatattgatacataaacacattttcatatacaaacgcagaatttgaaaaaagatcaagagaattgcacgtgtgggtgcagtgagaaaccaagctagctcaaacccaaaggtagggtcatcctaattttatttgcattgttccgattttatcatatgagagaattagagaagatgtaaataaaatagattatattaaatgtctaatcctcttataattaagctcctcattc

SEQ ID NO: 716 - DNA, 1548 bp, Artificial Sequence
  Artificial sequence
  P1740
gcaatttgtcttgtgtttctcacaacacaaaaacttgtaaaagtgttaaaaaatcaagatctgaaaaatcttatcaccgcttctaggtttttcagttttttttcttccttttcctgatctaaattaacttatatttcttagggtttcacttcttgaaacatttaatcagaattaattaacctctctagggctttcatggcgaatccatggtggacaggacaagtgaacctatccggcctcgaaacgacgccgcctggttcctctcagttaaagaaaccagatctccacatctccatgaacatggccatggactcaggtcacaataatcatcaccatcaccaagaagtcgataacaacaacaacgacgacgatagagacaacttgagtggagacgaccacgagccacgtgaaggagccgtagaagcccccacgcgccgtccacgtggacgtcctgctggttccaagaacaaaccaaagccaccgatcttcgtcactcgcgattctccaaatgctctcaagagccatgtcatggagatcgctagtgggactgacgtcatcgaaaccctagctacttttgctaggcggcgtcaacgtggcatctgcatcttgagcggaaatggcacagtggctaacgtcaccctccgtcaaccctcgaccgctgccgttgcggcggctcctggtggtgcggctgttttggctttacaagggaggtttgagattctttctttaaccggttctttcttgccaggaccggctccacctggttccaccggtttaacgatttacttagccggtggtcaaggtcaggttgttggaggaagcgtggtgggcccattgatggcagcaggtccggtgatgctgatcgccgccacgttctctaacgcgacttacgagagattgccattggaggaggaagaggcagcagagagaggcggtggtggaggcagcggaggagtggttccggggcagctcggaggcggaggttcgccactaagcagcggtgctggtggaggcgacggtaaccaaggacttccggtgtataatatgccgggaaatcttgtttctaatggtggcagtggtggaggaggacagatgagcggccaagaagcttatggttgggctcaagctaggtcaggattttaacgtgcgttaaaatggtttttaatttacagaagttaacaataagattataatgatgtttattatgatgatgaaaaccagtcagttgctacttgttactagtgagctatatagtttgtggacattatattatgttctctcttgactatgattattatttgctaaatttcacttagcttacttgtgtttttatgatgttttattaaaagtttttctctttgttggattctccaattttttatagtgaggttaagtgtgcatacatatatacatgtgtacatgattgacgatcctcattaaattagaacaccttggggttgaccctttttcaaatatgattagcatatacagactatatataatttgaaaatgataaaatttcaagtgcttggtgtaattcctttcgaa

SEQ ID NO: 717 - DNA, 1548 bp, Artificial Sequence; identical to SEQ ID NO: 716
  Artificial sequence
  P4524

SEQ ID NO: 718 - DNA, 1793 bp, Artificial Sequence
  Artificial sequence
  P25105
tttatgaaataaagccccagattctcggcccaaatagttttggagctaaaaaatacttttttggacaatgggtaaattttttttatattatttatgagtttctctcttctgcagaaagaaaatatacaaattacatcatacacaatttcaaattgataatattttcgttttgaaaaaacaaatactttacagtctctcacaattgaactacatactccatgcctttcaattaagaaagagtgaactacaagtgttagctaagtacacaaatatattaaggggagaaagagataagacttgtgaaagttaatttatagaaaagaatagagaacaaatcatataatcggtacagtcgtttatttaacacaattaattctttttgtttcattattgtgtgttatgtagtcccgaggagttcaaccaccctttggctttttgtctacctcaattaaattaatcaataagttatgttttagctatatttatacataaattatgttttagttgagagttgttgagtagaaaaaaaagaagagtaaaaagactaaaatattataaacgacttttaaaattttgtttttctttggacaaaataatttaggataatatgcatatgtacatatctaagaagtagtttagtttacattagaagacgattaaactttactttagacaatggataatggataatatgacaaggaggtggctggaaagatatggtattggttcattttgacattaatatgaaacaaacttaattttgctacaactagtaagtaattacttgaaataattatgctttgatccatcaatatagaatctcctaattaagtttcttacgatgcatgcgtgtatgtaaatactagtattttatttatagcaattgtattattcttaggcttatttgactttcatttttaagtgaattttaatttccttcaagtattcaaacatttcaataattagcaaattataaatcttttgtatgtgtgattgtttaatattttggctgttatagattcgtgaaatatatttatatttggatccaatgaaacacttcgtagatattattttatattgttttttatattccaaaaaaccttatgattcaactttcgatataaatattgaaatgggaaaacgatcgtgcgccccattagttcaacctcggcgctcgaccctacacatcaattataacgctaacttaaaaaagacaaaatacaaaatgacaggtttttaaaaaattatcttaaccaattaatatttaaagccaatttttaacaaatttttctgtcaaatgacaataaaactgcaaaacaatatgtcatcaaaattttcccaagaaaacgtacgatgcatattgtatcctatttgtaatacgactttttttctgtcttaaatataattatgtcactctctcaagccttgagttgagggatttgttttaaatttttatttcttataaacactatacgtatacatgtatgtgtatcacatatacatatgcttccacttatttttataagttagcttccattacatcttttctctttcttgcttagtatcattctttgtcgtgttcttttaattaaccttttgcaatttgtcttgtgtttctcacaacacaaaaacttgtaaaagtgttaaaaaatcaagatctgaaaaatcttatcaccgcttctaggtttttcagttttttttcttccttttcctgatctaaattaacttatatttcttagggtttcacttcttgaaacatttaatcagaattaattaacctctctagggctttc

SEQ ID NO: 719 - DNA, 1237 bp, Artificial Sequence
  Artificial sequence
  P1721
tcacatcaattaatacgacaccgtctcgggtgaagaatctctcctctcttgccctaaagcgagttagggtttaacacacaaagcataccctttagatttgtgtctcttagctctgtttttgtcggcttgtgtaaccgatcaactcaagctattggctcctcacctcctgaaatttgacttctccaatggatctcaaagtttctcttatatgaattctatcttcaccctcacaatatctttatatatatgagccacaagaacaagaagagtcagtagatgcggctgccatggacggtggttacgatcaatccggaggagcttctagatactttcacaacctcttcaggcctgagcttcatcaccagcttcaacctcagcctcaacttcaccctttgcctcagcctcagcctcaacctcagcctcagcagcagaattcagatgatgaatctgactccaacaaggatccgggttccgacccagttacctctggttcaaccgggaaacgtccacgtggacgtcctccgggatccaagaacaagccgaagccaccggtgatagtgactagagatagccccaacgtgcttagatctcatgttcttgaagtctcatctggagccgacatagtcgagagcgttaccacttacgctcgcaggagaggaagaggagtctccattctcagtggtaacggcacggtggctaacgtcagtctccggcagccggcaacgacagcggctcatggggcaaatggtggaaccggaggtgttgtggctctacatggaaggtttgagatactttccctcacaggtacggtgttgccgccccctgcgccgccaggatccggtggtctttctatctttctttccggcgttcaaggtcaggtgattggaggaaacgtggtggctccgcttgtggcttcgggtccagtgatactaatggctgcatcgttctctaatgcaactttcgaaaggcttccccttgaagatgaaggaggagaaggtggagagggaggagaagttggagagggaggaggaggagaaggtggtccaccgccggccacgtcatcatcaccaccatctggagccggtcaaggacagttaagaggtaacatgagtggttatgatcagtttgccggtgatcctcatttgcttggttggggagccgcagccgcagccgcaccaccaagaccagccttttagaattgaaaattatgtccgtaacatagctgtaaccaaatttc

SEQ ID NO: 720 - DNA, 1237 bp, Artificial Sequence; identical to SEQ ID NO: 719
  Artificial sequence
  P4418

SEQ ID NO: 721 - DNA, 2182 bp, Artificial Sequence
  Artificial sequence
  P25107
ttacctgaattctccgtcaatgtcgttgtgatataagagattaaatttgattttaaaacaaatatctgattttaaaatgcatgtattttaagaacaaaacatgttattaacactaacatattaatatttgtcatgctatccaacaaaaactcatgaaataaataaatatttgtcatgttatccaataaaaacccatgtaatattgtaattttttaaatttcgcaatctataagagaattgcatgctttttataaatatttcgtgctatttctgaaaaacacattatttcagagaaacatatatatcgtgtatatatattctgtatgtattttaaagaattgcatgctcttttgtaaatatatcatattattttagacaaatacataaaaactttataactacaaccaccgatatttttgtaaaaacaagaaaatctaaggatattttagtattttatccaccatagaaaatgttatttacctaagtttcctgacacaaggctattctctcaattcttttcaattccatggttactttctaatattaccctatataatattgatattttcaaacttttgatgtaaatatgaaattttcaatgtagaaacttaacacatgtcactggagagatgatgctttttatatgtttattttaaacaaatcccacttaaaatctgtatacacttttttggggtaccttatgtagattatatcgaatttcatgaatttctaacttagaaagttaatatacattgataataaatagtttggtctatattttttttactatcaataataatttataattagtttaataaaaattgaagtgcactcactcatggtaatagtttttaattagttttagaatatatgaccaagaccaaaaacattttgaaactgaatttagttttgaataggtagaatctcggttttaaagaaaatgatgaaattcataatggaaggcgttacatgcacacgcttcaaggcaattcgattcatggctaacatttttgattcacttttattttactttttgtcatctgtttattctgtttcaattaagtgtcgttttaagactttaattttgtttcaggataaattttattttatattttcaatgcaaatatttttttttgttaaaatttcatgtcttatctatgtttttctaacagattgacaaaaaaaaaatctatgtttttctaacgtattaactgatgaaagaaatataactgtgtattaatgaaagatagaagtgaaactttaattaaattttaatactatatgttaattaactttaaacagcatataatgataaatggtgggagtattacatttgtttctagggaatactgcattattatgcggacaaatttgatatgtaactttcaaaaacttatacaataatttatatttagacttctcgtttgttttctatataataatttccaacaactttatcaaaaaaaataaaaaaaaattccaacaatttaatatcagcatgtttcttccatctcctattcatatacctttggcttttaaattgtaaatttcttaatttcctttttctttaaattttaactcttaaaagttttcctttattttcttggtttgaagctatatgccaaaaagggaaacgcatatatccagagaagaaaaactcgaaacccttgtcttttcatggatttcaagtatattattaatatgcaattattcgtatattaatatatgcccctatgcgtattttattttttaatgcgaaaggaatgatattcagctaaattttcggtgtgtctattgctttttttttccctttcctcgttcaaaaaaagtacttgcagagtcactcactctcagtctcagcacatgaattaatttgaagcttccctagaattctttcacatcaattaatacgacaccgtctcgggtgaagaatctctcctctcttgccctaaagcgagttagggtttaacacacaaagcataccctttagatttgtgtctcttagctctgtttttgtcggcttgtgtaaccgatcaactcaagctattggctcctcacctcctgaaatttgacttctccaatggatctcaaagtttctcttatatgaattctatcttcaccctcacaatatctttatatatatgagccacaagaacaagaagagtcagtagatgcggctgcc

SEQ ID NO: 722 - DNA, 1348 bp, Artificial Sequence
  Artificial sequence
  P1722
cccatgtcttgtgtgtctgcttcatgcaacatgttggtttggatttggttaatctaaaagtttaagataaggttttcggattctcttcctgtcttgtaatagtttcttgtcggagagccatcaacaccaacttcaacaaaaaaaacaagaaaaagaaaaagattctctttctcgttttatttccattagagaagaaaaaaagaatggcgaatccttggtgggtagggaatgttgcgatcggtggagttgagagtccagtgacgtcatcagctccttctttgcaccacagaaacagtaacaacaacaacccaccgactatgactcgttcggatccaagattggaccatgacttcaccaccaacaacagtggaagccctaatacccagactcagagccaagaagaacagaacagcagagacgagcaaccagctgttgaacccggatccggatccgggtctacgggtcgtcgtcctagaggtagacctcctggttccaagaacaaaccaaagagtccagttgttgttaccaaagaaagccctaactctctccagagccatgttcttgagattgctacgggagctgacgtggcggaaagcttaaacgcctttgctcgtagacgcggccggggcgtttcggtgctgagcggtagtggtttggttactaatgttactctgcgtcagcctgctgcatccggtggagttgttagtttacgtggtcagtttgagatcttgtctatgtgtggggcttttcttcctacgtctggctctcctgctgcagccgctggtttaaccatttacttagctggagctcaaggtcaagttgtgggaggtggagttgctggcccgcttattgcctctggacccgttattgtgatagctgctacgttttgcaatgccacttatgagaggttaccgattgaggaagaacaacagcaagagcagccgcttcaactagaagatgggaagaagcagaaagaagagaatgatgataacgagagtgggaataacggaaacgaaggatcgatgcagccgccgatgtataatatgcctcctaattttatcccaaatggtcatcaaatggctcaacacgacgtgtattggggtggtcctccgcctcgtgctcctccttcgtattgattagttagataggcggtggttggtgcgttctttttactggaatgattatattttccattaggatggttaggcttttgtttattaaagctatcaagtttcttttttttttacggataattcggatgacaattagctagtgtttgtttgtttgttttgtggcggcttttctgacttgactattttgatcgcggatagctttgtatgaaagtgaa

SEQ ID NO: 723 - DNA, 1275 bp, Artificial Sequence
  Artificial sequence
  P26296
atggccgaatcgcaaaccggtggtggtggtggtggaagccatgagagtggcggtgatcagagcccgaggtctttgaatgttcgtgagcaggacaggtttcttccgattgctaacataagccgtatcatgaagagaggtttacctctaaatggcaaaatcgctaaagatgctaaagagactatgcaggaatgtgtctctgaattcatcagcttcgtcaccagcgaggctagtgataagtgccaaagagagaaaaggaagaccatcaatggagatgatttgctttgggctatggccactttaggattcgaagattacatcgatcccctcaaggtttacctgatgcgatatagagagatggagggtgacactaaaggatcaggaaaaggcggggaatcgagtgcaaagagagatggtcaaccaagccaagtgtctcagttctcgcaggttcctcaacaaggctcattctcacagggtccttatggaaactctcaaggttcgaatatgatggttcaaatgccgggcacagaggcggccgctgccgctgcggcagcggccatggtgagcaagggcgaggagctgttcaccggggtggtgcccatcctggtcgagctggacggcgacgtaaacggccacaagttcagcgtgtccggcgagggcgagggcgatgccacctacggcaagctgaccctgaagttcatctgcaccaccggcaagctgcccgtgccctggcccaccctcgtgaccaccctgacctggggcgtgcagtgcttcagccgctaccccgaccacatgaagcagcacgacttcttcaagtccgccatgcccgaaggctacgtccaggagcgcaccatcttcttcaaggacgacggcaactacaagacccgcgccgaggtgaagttcgagggcgacaccctggtgaaccgcatcgagctgaagggcatcgacttcaaggaggacggcaacatcctggggcacaagctggagtacaactacatcagccacaacgtctatatcaccgccgacaagcagaagaacggcatcaaggccaacttcaagatccgccacaacatcgaggacggcagcgtgcagctcgccgaccactaccagcagaacacccccatcggcgacggccccgtgctgctgcccgacaaccactacctgagcacccagtccgccctgagcaaagaccccaacgagaagcgcgatcacatggtcctgctggagttcgtgaccgccgccgggatcactctcggcatggacgagctgtacaagtaa

SEQ ID NO: 724 - DNA, 1820 bp, Artificial Sequence
  Artificial sequence
  P8079
ccgatttcccaatctctacctgattatctagggtttctgagatggccgaatcgcaaaccggtggtggtggtggtggaagccatgagagtggcggtgatcagagcccgaggtctttgaatgttcgtgagcaggacaggtttcttccgattgctaacataagccgtatcatgaagagaggtttacctctaaatggcaaaatcgctaaagatgctaaagagactatgcaggaatgtgtctctgaattcatcagcttcgtcaccagcgagtaatttctttctctactttctcaaaaatgttacctttttgttgctttggtggttatagcgtgtaaagccctcttctttgttaagttagattgatgttatattcattgggttgttaagcaaagtcactatgtcgattttggaatattgttttgccttttagggctagtgataagtgccaaagagagaaaaggaagaccatcaatggagatgatttgctttgggctatggccactttaggattcgaagattacatcgatcccctcaaggtttacctgatgcgatatagagaggtatgttccacttcagattagtcagtttacattctgctatacattcactgactctctgtttttccttctcatttccttgtctatgctatttggattggaattttgcagatggaggttcgtggttctcctctttcatttatctttctgatagtcgaattttgtacgtggatccttttatggggtatatggtgtatgattgtatctaattaggattgtctgctaccctttgctattgttatctgtctgatagggtgacactaaaggatcaggaaaaggcggggaatcgagtgcaaagagagatggtcaaccaagccaagtgtctcaggtaatgactcggtcttctccagttgatatggtcgtttacctaagcattagcttctccagctaatttattgtttccctgtctttactttctgaacagttctcgcaggttcctcaacaaggctcattctcacagggtccttatggaaactctcaagtaagtgttttccgacaaaagaaatgttgatacttataaatgaattcattctctacatagagcagagccggggtataaagagagaatattattaacaattaaaggatttaaggactttaatagactcgataaaaccgtcatatatgcattatccactttttgaaatctagacataggttctcatatgttccagtctctgaggttcggcaatagcatcgagcatcttgaagtgttaatggtatttgtaatctatcaatatgcagataattgattaaactcgtttgtgaatgtagggttcgaatatgatggttcaaatgccgggcacagagtagtactaggacactattcatcacaatcttccgagactcgactatgcctgttgtgtctgagaatctgagtgatccactttccatagatatggattgtggtatctcagtttttgggagagagaagatttgtatatgattgtgttgtagggagaagagtttggtttgcttatgataagaattgaaaagcaccttttttttcttttgactgttatgtttcttaggttttggtcttaagcagaagctatttatcaccacttcattggcctgttgattctttcatgcaagtgagcccgtaacttttataaaacaacatcatgatttataattatctctttgattttttggtcctaaattcgagtttcatttgacatcatccattgataaaaagaaacgaaacttgatattgaatcgttgtggtgtggtaaaattcacgatctaagtttgtgataacactccg

SEQ ID NO: 725 - DNA, 931 bp, Artificial Sequence; identical to SEQ ID NO: 219
  Artificial sequence
  P1833

SEQ ID NO: 726 - DNA, 1206 bp, Artificial Sequence
  Artificial sequence
  P13710
cagccatcgactaagatttgaaatctttaacgtgaaccagctccgatggcgattccacaaagaaacaagcgcaaagcaagatcctcgccggaacggctaacacaaccgccggaactaccacacaactccgacgttccttcttcttcgtcttcttctgccgctgataatttcttttcttggtcgacgaaacagtttgctttcccgccaggttatagatttgtaccaaaggaccaagaactcatctttcattacttgaaacccttttcgcaaggcaataaatgctcattgctcaatgttcctatccatcgtgtgaacatctacgagtcaaatccacaacatctttcaggtttgtctccgtcaatggctctgttctttattctctaatcgtggtttatgtatataaatggctctgttcttttgaattcaatacagagaaatatgagaagggtaatgataaagattggttctatatatcggagaggaccaagaccggtaaggctggaagaagtaataaacgtgtcgacaatggaggatattggagcgcaactgtagctgcccaaaagatcaacgctggaaatggcatagtcggctacaagacttcactagagtactatgttgggaaacaatcaaatagtgtcaaaggggattggttaatgcaagagtactggtttgagtcttctgatgataacaacaacgagaaggtgagggtaagtgtctttacttggattccaagttattaggattcgtgacttttggatttattgtgttttgttttggttggtgtgtataggtggatcatgctttgtgcaagatttatctgactccagcggcagcaaagaagaagaaagctgaggaagcagagaatgagaagctgaagaaagaagaagacgttgagcagctggatttgaatcaaccagaccaattgcagctgcaacagcctcatgatattgtgtatcaaccgcagtattgtttacttccagaacatcatcagccgcagccttttcctgataacttttctgagttgatcagctttcaacagcaaccagtgatgatcccagacgattttgaagatttcttggctgaattcactaaaccacattcactggatggagatgaagaattcaacaattatggtttgtttgaaggcttctttgacacagaaggaatgataaaacattaaactaactgatctcaatctgctcatac

SEQ ID NO: 727 - DNA, 2197 bp, Artificial Sequence
  Artificial sequence
  P2069
aaagacaacaatcggagaacaatctggtctgctgctaaaatttaataaattgttttgtctaattgtctccacccataaaaaagcgcgaattcaattcaccgactaaagacattctccggtggagaccccgatgcaatccactcatataagcggcggaagtagcggtggtggtggtggaggaggaggagaggtgagtcgaagtggattatctcggatccgttcagctccagctacttggattgaaaccctactcgaagaagatgaagaagaaggtttaaaacctaacctttgtttaacagagctgcttactggtaataataactctggaggagtgataacgagtcgtgacgactcgttcgagttcctgagttctgttgagcaaggattgtataatcatcatcaaggtggtggctttcaccgtcagaatagttctccggctgattttcttagtgggtctggttctgggactgatgggtatttctctaattttggtattccggcgaattatgactatttgtcgaccaacgttgatatttctccgactaaacggtctagagatatggaaacacagttttcttctcagctggtaagactctgtttccattaaattcagataaaaatgcgaactttaatggaaagataaacttttttttgttgcttactttaatgtcaagttgtgtgaatttgtggtcaaaatggtgaggttaggttctattttggggattgatacggttttagtttaattgggtgtttgaattcttcagttgtggagacaataaagatgtaaaagagttgtcttgtctaatttgacaacttgcatttgtttgaaacaaattcccctgcaagttgcagttgttttttctttgtttccctgtggctgtgaaagtgaatgttgcataaagtttgtattagtagatgggcaaacaaaaagagccttcattggttagatatgtatcgatcttgtaactttagaagtttctgaatcatgacttttgtgaaatgaaacatgttttcatgtgtgcatatggtttgtgagttaactaataactcttcccttttggtttgtgagtagaaagaagagcaaatgagtggtgggatatcaggaatgatggatatgaacatggacaagatttttgaggattcagttccttgtagggttcgtgctaaacgtggttgtgctactcatcctcgtagcattgctgaacgggtaattacttaaaagtttgtgctagatgctttgcagtactaattctgtttctgcctcattcttgttttgtcattaagcttttctctgttcattttgttaggtgagaagaacgcgaataagtgatcggattaggaggctgcaagagcttgttcctaacatggataaggtaaattctttttacaaggcagattggttttaagttttctttgaagtttttaaaaagaattaccaaatgggtccaagattagatatgcttaaagcttaaggttagagcattattgtgaaggcattattggttcttaaggtaggagctagtgcttagccgtaaagtaaaggaatttggatgttaactgttgatgattgtgaaggcattattggaacttcaaaactacttactccttaatccataaactatggttgtgcagtcttttagaagattcaatgcatgatagtccgggagagttataacgcgaagattcgtttttttttgtattttctttgttgcagcaaaccaacactgcagacatgttggaagaagctgtggagtatgtgaaggctcttcaaagccagatccaggtttatctacagatactaattgattagaaacacaaatttatgtttaataaaatatgttaggattttggatttttttgatcattttatttggttttgatgatggattcaggaattgacagagcagcagaagagatgcaaatgcaaacctaaagaagaacaataatgtatcctttaggatttgatatatctgtattttatttttgtactatctaaaaatggtgatgatctgttcgaaaattcgaaacatgatcttatatattgaactagaaaaaatagatatatatgaattttagctgtaaaatttttgtacaataaggagaaaaagatttagaagagtcaataaaaagatgatgtttacaagtcgagaatatatattttgttagttttgtttatcaatttatgctcaaggtttca

SEQ ID NO: 728 - DNA, 1290 bp, Artificial Sequence
  Artificial sequence
  P13696
ggcgggaaagacggcgactgagagagaggagagaagaatggagtcggagaaagtggtggtggacgagctgccgctagctattgtgcgccgggtggtgaagaagaagctgtcggagtgttcgccggattatgacgtcagtattcacaaggaagctttgctcgcattctcagagagtgcgaggatcttcatccactacctctccgccacgtatgtacacttcacaaaccctaactttttttcgaatttctgcactatgatagtgaatgatttggaatgttccaagtttgggtttatgttaatgtgattcaattgatgaatgttagtgtttgtgaattgtgatcgatcgaattgatggatttagtttaatttgggggtgaatgatatagggcaaatgatttttgtaaagatgcaagaagacaaactatgaaggctgatgatgtgtttaaggcattagaagaaatggatttttcagaatttttggagccgcttaaatcttctcttgaaggtaagtgttttgttcggatgaagatcctattgtcactatctgttgttactttcatggagtgttagtagaaatggcttaggttgtgatttgtcttgttatggacactggcctaggtgtgtgcactttgagcttatgatgtcaatcctagtgtaatccacatgactggttttcagattttaagaagaagaatgcggggaaaaaggcgggtgctgcagctgcttcgtatcctgctggtggagctgctttgaaatcttcaagtggaactgcttcgaagcccaaagagacgaagaagaggaaacaggaagaaccatctacgcaaaagggtgcaaggaaaagcaaaatagatgaggaaactaagaggaatgacgaggagactgagaatgacaacacggaagaagagaatggaaacgatgaggaggatgagaatggaaacgatgaggaagatgagaatgacgatgaaaatacagaagagaatgggaatgatgaggagaacgacgatgaaaatacggaagagaatgggaatgatgaggagaacgagaaggaggatgaggaaaacagcatggaagagaatgggaatgagagcgaagagagcgggaatgaggaccatagcatggaagaaaatgggagcggggttggtgaagataatgagaacgaggacgggagcgtaagtggaagtggtgaagaggtagagagtgatgaagaagatgaatgaactcaaggttatatttttgctaagaacatgttttcaggtttatgttggagattagcttgtaagcttgaagcag

SEQ ID NO: 729 - DNA, 1572 bp, Artificial Sequence
  Artificial sequence
  P26054
atggagtcggagaaagtggtggtggacgagctgccgctagctattgtgcgccgggtggtgaagaagaagctgtcggagtgttcgccggattatgacgtcagtattcacaaggaagctttgctcgcattctcagagagtgcgaggatcttcatccactacctctccgccacggcaaatgatttttgtaaagatgcaagaagacaaactatgaaggctgatgatgtgtttaaggcattagaagaaatggatttttcagaatttttggagccgcttaaatcttctcttgaagattttaagaagaagaatgcggggaaaaaggcgggtgctgcagctgcttcgtatcctgctggtggagctgctttgaaatcttcaagtggaactgcttcgaagcccaaagagacgaagaagaggaaacaggaagaaccatctacgcaaaagggtgcaaggaaaagcaaaatagatgaggaaactaagaggaatgacgaggagactgagaatgacaacacggaagaagagaatggaaacgatgaggaggatgagaatggaaacgatgaggaagatgagaatgacgatgaaaatacagaagagaatgggaatgatgaggagaacgacgatgaaaatacggaagagaatgggaatgatgaggagaacgagaaggaggatgaggaaaacagcatggaagagaatgggaatgagagcgaagagagcgggaatgaggaccatagcatggaagaaaatgggagcggggttggtgaagataatgagaacgaggacgggagcgtaagtggaagtggtgaagaggtagagagtgatgaagaagatgaagcggccgctgccgctgcggcagcggccatggtgagcaagggcgaggagctgttcaccggggtggtgcccatcctggtcgagctggacggcgacgtaaacggccacaagttcagcgtgtccggcgagggcgagggcgatgccacctacggcaagctgaccctgaagttcatctgcaccaccggcaagctgcccgtgccctggcccaccctcgtgaccaccttcggctacggcctgcagtgcttcgcccgctaccccgaccacatgaagcagcacgacttcttcaagtccgccatgcccgaaggctacgtccaggagcgcaccatcttcttcaaggacgacggcaactacaagacccgcgccgaggtgaagttcgagggcgacaccctggataaccgaatcgagctgaagggcatcgacttcaaggaggacggcaacatcctggggcacaagctggagtacaactacaacagccacaacgtctatatcatggccgacaagcagaagaacggcatcaaggtgaacttcaagatccgccacaacatcgaggacggcagcgtgcagctcgccgaccactaccagcagaacacccccatcggcgacggccccgtggtgctgcccgacaaccactacctgagctaccagtccgccctgagcaaagaccccaacgagaagcgcgatcacatggtcctgctggagttcgtgaccgccgccgggatcactctcggcatggacgagctgtacaagtaa

SEQ ID NO: 730 - DNA, 304 bp, Artificial Sequence
  Artificial sequence
  P8664
acggtgcgtcgtaaatctttgtgtactaaggtgtcttttgagatgaatacgcagcgtaagtcgaagcatcttaagaccaatccaaccattgttgcctcttcttctgaagaagtgagcagtcttgagtgggaagaaatagcaatggctcaggaagaagaggatttgatttgcaggatgtataagcttgtcggtgaaaggtgggatttaatagctgggaggattccaggaagaacagcagaagagattgagaggttttgggtgatgaagaatcatcgaagatctcaattacgttgatggccaactc

SEQ ID NO: 731 - DNA, 2134 bp, Artificial Sequence
  Artificial sequence
  P23528
cggcagaagattacttggttggtttgttctcagattcaatgctctgtgctatccatgcaagacgtgttactctaagtaagtactctaaaagaagacatttttcagtctcaacttaggaatcacaagcatacattttatatccctttgaatcattagttacttgaatatcatatataaaatgcttatctatatctgttttttgttcatatcagtgagaaaagactttgaacttgcacgccggcttggaggaaaaggcagaccatggtgatagaaaactcactcactattcacatctcttacattgtaagtgaggatcgaatagttaacaacaagtgtgtcgtaggttgtataaggttattctctccttgtctcttggtgatgcatgtccttttattttactaaatgatctgaccaaaaccttcttttgaaacataactggaaacccgaatttggtttgattccaatatctaggctgtaaaacttctttctctatgtgtgtttctatctgcttttcgttggatctgattgttttccattgagattccacttgacaaaaacgtttctttcgttaagttctaacttccaaaggttcatgtatatataatttgaagcctcagttagaaagggttgtgattgaaagaagaaaaaaaaagtaagaggaagatttgaaagaacatgtgttttgggagggctttagtagaaatatctctcagacgagtgacgagtggattcccaattacaacttgtcaaggcatattaaaaaggttgagatatccttagcacttcaaatttaaataattcatattgatttttagtgataattcgcataaaacatttgtgatatcatagtgttgtcactaaaaaaaacactataaattttcgaaaagctcgaatttcgaatttggtgatatttatttcattgtcaactcttttaagttgcctctttttcttgggttctctatagtctcttttgttttgttttttacatcctttatgatctctctctgtacattcgtaaaaattgaatgcagaccgaaaaaactaaacagaaacgaggatggcaaaagttggatgcgcccatgaatcatgcaacacaatggtcccaagttcccaacagattcattcgcaaaaattcagagtagaccgaaagaaaaaacaaattgtagtattataaaaaaaaagaaagaaagaggatgggtcaagtgaaggcgtcatgaatcatgcgatggtcccaacaaattaaatgaaatataaaatccacgtgtcatgttcagttgcaactgcatagtttgttcagtacgttgctgatcaaccttttcttttttaaagttgatagataaatataataataaaccgaacaaaatttaaaagaagctttgaataaaatttgcgatgtgaattaatggaggaataaagggtatatcctcgacgttaaattaattttatattcatccctaacaaactttcaactcaacttttgatagttctaacaatatatttcattaaattgacaaaatttaattcgatttgtaatagattggacttcataaatgataatcaagtgattctcctaatgctttttttcttcttgggaaaaatgaatacatatattgactcttttttttcatacatatttgtactcaacatagttgatttatatcgacttaattatgatttattcatctgcgtgtaaatataaaacatcaagtagtatcattttaaaaaaagcaattagacaagaacatgacggagcaaatgatgtaatgcaacatgtcttatgattctcattggtccttaaacgaaatcactcgagcattgcacacatactgacatatattggctgccacccataagttgctaaattaattaataagaataatattagttaaatccgatttaaggaaaacaaagtacgatatacatcatacacgattccttaatgtggaaaccgaccaaaccggtcgttaaactttgcccttataaatacagaatacacttcatgttcttcccttaaaaatccatcattctctcttcctctctgctctctctttaccttaaaccgtaccaaaccgtattgattgataatattgcacggtgcgatcgtaaatctttgtgtactaaggtgtcttttgag

SEQ ID NO: 732 - DNA, 2134 bp, Artificial Sequence; identical to SEQ ID NO: 731
  Artificial sequence
  P25139

SEQ ID NO: 733 - DNA, 1050 bp, Artificial Sequence
  Artificial sequence
  P2532
cctaagcatcagattagcttttgtagggtttttcttttccggtttcatgtaccctcctaattcctctaagtccaccgctcatgacggcggcggcgatgccgacaccaatcaatatgactcagccgctggagctacccgtgatttctcctctcttggccctcaaacccaccatcatccgccaccgcagcggcagcagcagcatcagcagaatcccaacctcgtcggccattatttaccgggcgagccatcttccatcggattcgattccaacgcttcttcttcgtcttctttgttccgacacagaagctctccggctggattctacgaccaacatcttcccactgatcccaacggtttttctctaggacggccaaacggaggctacggcggaggaggagagcaagggccgtcgaggttgaagtcggagctgagattctctagtgggagtagtagccatcaagaacataattctctaccgcgaatctcggaggttgaagcggctgcagcggctagaaacggtgtcgcatcaagtagtatgagttttggaaataatcgtactaacaattgggacaactcgtcttctcatatcagtttcaccattgatcaacccggaaaacggtccaagaactccgactttttcaccttagaaactcagtatagcatgccgcaaacaactctggaaatggcgacaatggagaacttgatgaacatcccagaggactcggtgccttgtagggctagagccaagcgcggcttcgcgactcacccacgcagcattgctgaaagggagagaagaacgaggataagcgggaagctgaagaagctacaagaacttgtgcctaatatggacaagcaaacgagctacgcagatatgttggatttggctgttgagcatatcaaaggtcttcagcaccaagtagagtcactggaaaagggaatggagagatgtacttgtggggcatgcaagaagcgatgatgaatgatattgttccaagtatgatgcaataaagtatagaagaaaaggagatcacttacgaaccaaattctaag

SEQ ID NO: 734 - DNA, 1031 bp, Artificial Sequence
  Artificial sequence
  P2425
taagcttaacataaaccctaatattttcttgatttttttcaagaaaataaaaacataaagatgcttgaagttagatcaatggatatgactccaaaatcaccagaacccgaatccgaaactccgacccggatccaaccagctaaaccaatctctttcagtaacggaatcatcaaacgccaccaccaccaccaccacaacaacaacaaagtcacttacaaagaatgtctcaagaaccacgcggcggcgattggtggtcacgcgcttgacggttgcggcgaatttatgccgtctccttcgtcaacaccttccgatccaacttctctcaagtgtgcagcttgtggttgtcaccgtaacttccaccgccgtgaaactgacgattcctccgccgttccaccaccgtctcttcttccatcttcaacaacaaccgccgcaattgagtatcagcctcatcaccgtcatcatcctcctcctccgctagctcctccgttaccacgtagtcctaattcatcttctccgccgcctatctcttcctcctacatgcttttagctctctccggtaataataaaaccgcaccgttctcagatctaaacttcgccgccgcggctaaccatctctccgccacgcctggctcgaggaagcgattcaggacgaagtttagctcaaatcagaaagagaagatgcatgaattcgccgatcgaatcggttggaagattcagaaacgtgacgaagacgaagttcgtgatttttgccgtgagatcggagttgataaaggtgttctcaaagtttggatgcataataacaaaaactccttcaaattctccggcggaggagcaaccaccgtgcagagaaacgataacggtatcggcggcgagaacagtaacgatgatggagttcgcggtttagctaacgacggtgacggtggtggtgggagatttgagagtgatagtggaggagctgatggtggcggaaacgtaaacgcctcgtcgtcttcgtcgtgaagaagaaaacatcatgtcgttttgcagggaaa

SEQ ID NO: 735 - DNA, 1132 bp, Artificial Sequence
  Artificial sequence
  P2426
aaagctcttaacccaaaaaccctaagtcttttttttcttcaaattattggttatattaatgttttaagctatgatggatatgactcctacaataacaacaacaacaacaccaactcctaaatcacccgaacccgaatccgaaactccgacccggatccaaccggcgaaacccatttcctttagcaacggcatcatcaaacgccaccaccaccaccaccatcctctcctctttacttacaaagaatgtctcaaaaaccacgcggcggctttaggtggtcacgctctcgacggttgcggcgaattcatgccgtctccgtcgtcaatctcctccgatccaacttctctcaaatgtgctgcttgtggctgccaccgtaatttccaccgccgtgatccagataacaacaacgactcttcccaaatccctcctcctccttccaccgccgtagagtatcaacctcaccaccgtcatcatccaccaccaccaccacctcctccaccaccacgtagtcctaactcagcttctcctccaccaatctcttcctcttacatgctcttatctctctccggtactaataacaacaacaacaacttagcttctttctccgatcttaacttctccgccggaaacaaccaccaccaccaccaccaacatactcttcacggatctcgtaaaagattccgaacaaaattcagccagtttcagaaagagaagatgcatgaattcgccgaacgtgttggttggaagatgcaaaaacgtgacgaagacgatgttcgtgatttttgccggcagatcggagttgataaaagtgttctcaaagtttggatgcataacaacaaaaacacctttaaccgccgtgatatcgccggaaacgagatccggcaaatcgataacggcggaggaaaccacactccgattctcgccggcgagattaataaccataacaatggacaccacggtgtcggaggaggaggagagcttcaccagagtgttagtagcggcggtggtggcggaggatttgatagtgatagcggcggagctaacggtggtaacgttaacggatcatcgtcgtcgtgaagttaaagatgagagtgtcaggttaataagaagcttagagtaagcttattcgtatta

SEQ ID NO: 736 - DNA, 937 bp, Artificial Sequence
  Artificial sequence
  P2423
caataaccaaaacccaagtttacaaaacatttcttcttcttgtttttcgaaaccctaaatgttttgagttgtcatggatgtaatagctactacaactactatagtatccgacttggattcacgacaacccgaaatcgaagctccgatccggatccagcccgcgaagcctatttctttctcaaacggcaaacgctgccaccaccatcatcttgcatctgaagcggttgcggttgcgacttataaagaatgtctaaagaatcacgcagcaggtatcggcggtcacgctttagacggatgcggcgagtttatgccgtcaccgtcgtttaactccaatgaccccgcttcactaacgtgcgctgcttgtggttgccaccgtaacttccaccgccgtgaggaggatccatcttctctctctgccatcgtccctgcgatcgaatttcgacctcacaaccgtcaccagcttcctccaccgcctcctcctcatctggcggggattcgtagtccagacgacgatgattcagcttctccaccgccgatctcgtcttcttacatgcttctcgcactctctggaggaagaggaggagctaacacggcggttccaatgtctaggaaacgttttaggacgaagtttagtcagtatcagaaggagaagatgttcgagttctcggagagagttgggtggaggatgccgaaagctgatgacgtggtggttaaggagttttgtcgggagattggagttgataaaagcgttttcaaagtgtggatgcataacaacaagatttcaggacgcagcggcgctagaagagctaacggcggagtagtagtaggaggagtaggagatagtcgtcagagtgttgttccgacaaatgggtcgttttcttcgacgtgaggaaaagaatggaaagcgttgaaaaagcgtcgtcgttttagaggctaa

SEQ ID NO: 737 - DNA, 767 bp, Artificial Sequence
  Artificial sequence
  P2427
gctatggatttgtcttccaaaccacaacaacaacttctaaactctcttcccatcgccggagaactaactgtcaccggagaaatgggtgtttgttacaaagagtgtttgaaaaaccacgcggctaatctcggcggccatgctctcgacggttgcggcgagtttatgccgagtcccacggctacttccaccgatccttcttctctccgttgcgctgcttgtggctgccaccgtaacttccaccgccgtgacccttccgagaatctcaacttcctcaccgcgcctccgatttcttctccctccggcactgagtcgccgccgtctcgtcacgtgtcttctcctgttccttgctcttactacacctcagctcctccacatcacgtgattctctctctcagctccggtttccctggaccgtcagatcaagatccaacggtggttaggtcagagaacagttcaagaggagcaatgaggaaacgaacaagaaccaaattcacgccggagcagaagatcaagatgagagccttcgcagagaaagctggttggaaaatcaacggatgtgatgaaaagtcggtgagagagttttgtaacgaagttgggattgagagaggagttcttaaagtgtggatgcataacaacaagtactcacttctcaatggcaagatcagagagatcgaacatggcctgtgtctgaacactcacagcaatgatggtgatgggtcttacatctttcttgaagaaagattcaagattcgggttaaaccgaatta

SEQ ID NO: 738 - DNA, 1043 bp, Artificial Sequence
  Artificial sequence
  P13792
ccttgtggttattctcaagaaaggtttcattttgagataaagtttgctgctctttctggttgtggatagatcaaaagaatggagattgcaagtcaagaagatcctattccaataaacactagttatggtaatagtggaggtgggcatgggaacatgaaccatcatcatcatgccaattctgcaccatcatctctcaacattactacttcaaacccactactagtctcctcaaatagtaatggtcttggtaaaaatcatgatcattctcatcatcatcatgtgggttacaacatcatggttaccaacatcaagaaagagaagcctgtggtgataaagtacaaggaatgcctaaagaaccatgcagctaccatgggaggcaatgctattgatggttgtggagagtttatgccaagtggtgaagaaggttccattgaagctctcacttgctcagtttgcaactgccatagaaactttcatagaagagaaaccgaaggtgaagagaaaacattcttttccccttacctcaaccaccaccaaccacctccgcagcagagaaaactcatgttccaccacaagatgatcaaatcaccattaccacaacaaatgataatgcctattggcgttacaaccgctggatccaactcagagtcagaggatcttatggaggaagaaggcggaggaagcttgacattccggcagccaccaccaccaccatcaccgtatagttacggacataatcagaaggaaaggtttaggacaaagtttacacaagagcaaaaggagaagatgattagttttgcggaaagagttggttggaagattcagagacaagaggaatctgttgttcaacagctttgtcaagagattggaattaggagaagagttcttaaagtttggatgcacaacaacaaacaaaatctctccaagaagagcaacaacgttagtaacaatgtcgacctttctgctggtaataacgacattactgaaaatcttgcttctactaatccttagttaagttcagattgttgttatataacttcact

SEQ ID NO: 739 - DNA, 1091 bp, Artificial Sequence
  Artificial sequence
  P2434
tccccaaaccaagaaacaatttgcaaagagaaagcaaaaggtttttgaagaagacccaattaaaaaagatggaaattgcaagtcaagaagatcatgatatgcccatcccattaaacactacatttggtggtggtggtagtcatggtcacatgatccatcatcatgatcatcatgctgctaattctgctcctccaactcacaacaacaacaatactactcaaccacctccaatgccgttacatggtaatggtcatggcaacaattatgatcatcatcatcatcaagatcctcatcatgttggttacaacgctatcatcaagaagcctatgataaagtacaaggagtgtctcaagaaccatgcagcagctatgggaggcaatgctactgatgggtgtggagagtttatgccaagtggtgaagatggctccattgaggctctcacttgctcagcttgcaattgccacaggaacttccatagaaaagaagtggaaggcgaactcgcagccaccgccatgtccccttaccaccaacaccctccacaccgaaaactcatgctcaaccaccaaaagatcagatcagctatgccacaccaaatgatcatgcccattggagtctctaactaccggtacatgcataacaactccgagtccgaggactttatggaggaagatggcgtaaccaccgcatctagatcgctaccaaacctgccatacaaccagaagaagaggttcaggacaaagttcacgccggaacagaaggagaagatgcttagttttgctgagaaagttgggtggaaaatacaaaggcaagaagattgtgttgttcaaaggttttgtgaagagattggagtgaagagaagagtgcttaaggtttggatgcacaacaacaagatccatttctccaagaagaacaacattaacctcgaagacaacgacaacgaaaagatcaacaatctcaacaatgttgatctgtccggtaataacgacatgactaagatcgtcccatgatataattaataacgttatttttatatgatctttgataattatttagttatctttatgttagctactagggttttaattttatct

SEQ ID NO: 740 - DNA, 817 bp, Artificial Sequence
  Artificial sequence
  P25364
atgtcattgacaacatttccagaaacagagtataaacgcactagtgagtgaaataagaatcagacatgagctcgttatcaaaaccaaacagacaatttttgtcaccaacaacaaacaaccaagacaccggcagagaacaaacaatcgcctgcgcccgagatatggttgtcttgtacaacgagtgccttaaaaaccacgcggtcagtctcggaggccacgctcttgacggctgcggtgagttcacaccaaagtcaaccaccatcctcacggaccctccgtcccttaggtgcgatgcttgtggctgccatcgcaacttccaccgtcgtagtccttctgacggcttcagtcagcaccggtcaccaccgtctccgttacagctgcagccactcgcccctgttccgaacttgcttctctctcttagctccggtttctttggaccctcggatcaagaagtcaagaacaaatttacggtggaaagggatgttaggaagactgcgatgattaagaaacataagaggacgaaattcacggcggagcagaaggtgaagatgagaggtttcgcggagagagcggggtggaagattaacggctgggatgagaagtgggtgagagagttttgtagtgaagttggaatagagagaaaagttcttaaggtttggatccacaacaataagtactttaacaacgggaggagcagagacacgacgtcctctatgtctttgaatttgaagttgtagatctctttacagtgatgggtcttcatcttcttgagataaggaaaaaccgaaacaaaaagaggttacggtagtctctgatc

SEQ ID NO: 741 - DNA, 925 bp, Artificial Sequence
  Artificial sequence
  P2424
tgagaaacctcctctccccaaaaacgacgtagtttcacatttctcgacttcttgaatggagtttgaagacaacaacaacaacaacgacgaagagcaagaagaggatatgaatcttcatgaggaagaagaagacgacgacgccgtttacgactctcctcctctctctcgtgttctccccaaagcctcgacagaaagtcatgaaaccaccggaactacttccacaggcggtggcggaggattcatggttgttcacggcggtggagggagcaggtttaggttccgtgagtgtctcaagaaccaagcggtgaacataggaggacacgcggtcgatggttgtggtgagtttatgccagctggaatcgaaggtaccatcgacgctctaaaatgcgccgcttgtggctgtcaccgtaacttccaccgcaaggaattaccttacttccatcacgcgccgccacaacatcagcctcctcctcccccgccagggttttaccgtcttccagctccggttagctaccgaccaccaccgtcacaagctcctcctcttcagctcgctcttccccctccacaaagagagagatcagaagatccaatggagacgtcttcagctgaagcaggaggagggattaggaagaggcataggactaagtttacggctgagcaaaaggaaaggatgttagctttagctgagaggattggatggagaattcagagacaagacgatgaagtgattcagagattttgtcaggagactggtgttccgagacaagttcttaaggtttggttacataacaacaaacacactcttggtaagtcgccttcaccacttcatcatcatcaggctcctcctcctccaccaccacagtcttcgtttcatcatgaacaagaccaaccatgaatcttgaatttctttgatcactagggtttt

SEQ ID NO: 742 - DNA, 868 bp, Artificial Sequence
  Artificial sequence
  P15364
tcttaactctcatgaattattggtctctctattatagttttttaagtaacaatctaattgtagtacggatgtctcttgagatgttcaagaattaagaaataaagaaagagggatcggagaatgaattttgaggatcaagaagaagatatggagatgtcaggtgttaatcccccctgcggttacgactctctaagcggtgagggagccacatctagtggtggtggaggagtaggaaggagtaaaggagttggagcgaagataaggtatagagagtgcttgaagaaccatgctgttaacataggtggccacgccgtggacggttgttgcgagtttatgccttccggtgaagatggaacgctcgacgctcttaagtgtgcagcttgcggctgccaccgcaacttccaccgcaaggaaaccgaaagcatcggcggtagagcccacagagttcccacgtactacaaccgcccgccgcagccgcatcagccgcctggatatcttcatctaacatctcccgcggcgccttacaggccacccgcggcatcgggggacgaggaggatacatcaaatcctagcagcagcggcgggaccacgaagaggtttagaacgaagttcacggcggaacagaaagagaagatgttagcctttgcggagaggttggggtggagaattcagaagcatgatgacgtggcggttgagcagttctgtgcggagactggtgttaggagacaagtgcttaaaatctggatgcataacaacaagaactctcttggtaagaaaccctaattttgctcgagacatgatttaaaacactagaggatcataattgtttctttttttggtatgactcttctgtaactacttctgctta

SEQ ID NO: 743 - DNA, 1160 bp, Artificial Sequence
  Artificial sequence
  P2431
cgtgtacttgttcatcttatctcctctgtaagtctctgattctcactgccatttagttttcttttttgccttattagtaatctcattatcatgttctttttcaggcataaacttcattgaagaaaaagtcttttttattttgttgatctcttttaattaagatccttttgggttttaatttattaatctccaagaaaaaaaatggatatgagaagccatgaaatgatagagagaagaagagaagacaatggcaacaacaatggtggtgttgttattagtaacatcattagtactaatattgatgataattgcaatggtaataacaacaacactcgtgtctcttgcaactctcaaaccctagatcaccaccaatccaagtctccctcttcgttttccatctccgccgcagctaaacccaccgtaagataccgtgagtgtctaaagaatcatgcggcgagcgtcggcggaagtgttcacgacggatgcggcgagtttatgccgagtggtgaagaaggaacaatcgaagctctcagatgcgctgcttgtgattgtcaccgtaatttccaccggaaagaaatggacggcgttggaagctcggatttgatctctcaccaccgtcatcaccactaccaccataaccaatacggtggaggaggagggagaagacctccgccgccgaatatgatgcttaacccactcatgcttcctccgccaccgaattatcagccgattcaccaccacaagtatggaatgagtcctcccggaggaggaggaatggtgacgccgatgagcgttgcttacggcggtggaggaggaggagctgagtcgtctagtgaagatctgaatctgtacggacaatcaagcggagaaggagctggtgcggcggcgggacaaatggcgttttcgatgtcgtcgtctaagaaaagattcaggacaaagttcacgacggatcagaaggagaggatgatggactttgcggagaagctagggtggaggatgaacaagcaagacgaagaagagcttaagagattctgcggcgagatcggagtgaagagacaagtcttcaaagtttggatgcataacaacaagaacaatgctaagaaaccaccaacaccaacaactactctctaatcagtgatcatatgattaattgagagatt

SEQ ID NO: 744 - DNA, 3558 bp, Artificial Sequence
  Artificial sequence
  P25148
gcttagcttagggttttggagagagattactaagaaagttttaatgtttgtttaagagaaaagttatatattagggttttctttattcagaagcttcaagatcagaaaagatggaagttagagagaagaaagatgagaaaatggagatgacaagaagaaaatcatcagctctagatcatcatcgtcttcctccgtacacttactcccaaaccgccaacaaagagaaacccaccaccaaaagaaacgggtcggacccggatccggatccggatcttgatactaacccaatttctatatctcatgctccaagatcatacgctaggcctcaaactacttctccggggaaggcaaggtatagagaatgccaaaagaatcacgcggcgagctccggtggacacgttgtcgacggttgcggcgagtttatgtcttccggggaagaaggcacggtggagtctcttctttgtgcagcttgtgattgccaccggagcttccatagaaaagagatcgatggtttgtttgttgtcaatttcaatagctttggccattcacagagaccactcggaagccgccacgtgtctccgataatgatgagttttggtggtggtggtggttgtgcggcggagtcatcgacggaggatctaaacaagtttcatcaatcttttagtggttatggagtggatcagtttcatcattatcaacccaagaaacggtttaggacaaagtttaatgaagaacagaaggagaagatgatggagtttgctgagaagattggttggagaatgacaaaactagaagatgatgaagtgaatcggttttgtcgtgagattaaagttaaaagacaagtgtttaaagtttggatgcacaacaataaacaagcagcaaagaagaaggatttggcggccgctgaagctcgaaaaacaaagaaaaaaatcaaagggattcagcaagccactgcaggagtctcacaagacacttcggaaaatcctaacaaaacaatagttcctgcagcattaccacagctcacccctaccttggtgtcactgctggaggtgattgaacccgaggtgttgtatgcaggatatgatagctctgttccagattcagcatggagaattatgaccacactcaacatgttaggtgggcgtcaagtgattgcagcagtgaaatgggcaaaggcgataccaggcttcagaaacttacacctggatgaccaaatgaccctgctacagtactcatggatgtttctcatggcatttgccctgggttggagatcatacagacaatcaagtggaaacctgctctgctttgctcctgatctgattattaatgagcagagaatgtctctaccctgcatgtatgaccaatgtaaacacatgctgtttgtctcctctgaattacaaagattgcaggtatcctatgaagagtatctctgtatgaaaaccttactgcttctctcctcagttcctaaggaaggtctgaagagccaagagttatttgatgagattcgaatgacttatatcaaagagctaggaaaagccatcgtcaaaagggaagggaactccagtcagaactggcaacggttttaccaactgacaaagcttctggactccatgcatgaggtggttgagaatctccttacctactgcttccagacatttttggataagaccatgagtattgaattcccagagatgttagctgaaatcatcactaatcagataccaaaatattcaaatggaaatatcaaaaagcttctgtttcatcaaaaagggttttggagagagattactaagaaagttttaatgtttgtttaagagaaaagttatatattagggttttctttattcagaagcttcaagatcagaaaagatggaagttagagagaagaaagatgagaaaatggagatgacaagaagaaaatcatcagctctagatcatcatcgtcttcctccgtacacttactcccaaaccgccaacaaagagaaacccaccaccaaaagaaacgggtcggacccggatccggatccggatcttgatactaacccaatttctatatctcatgctccaagatcatacgctaggcctcaaactacttctccggggaaggcaaggtatagagaatgccaaaagaatcacgcggcgagctccggtggacacgttgtcgacggttgcggcgagtttatgtcttccggggaagaaggcacggtggagtctcttctttgtgcagcttgtgattgccaccggagcttccatagaaaagagatcgatggtttgtttgttgtcaatttcaatagctttggccattcacagagaccactcggaagccgccacgtgtctccgataatgatgagttttggtggtggtggtggttgtgcggcggagtcatcgacggaggatctaaacaagtttcatcaatcttttagtggttatggagtggatcagtttcatcattatcaacccaagaaacggtttaggacaaagtttaatgaagaacagaaggagaagatgatggagtttgctgagaagattggttggagaatgacaaaactagaagatgatgaagtgaatcggttttgtcgtgagattaaagttaaaagacaagtgtttaaagtttggatgcacaacaataaacaagcagcaaagaagaaggatttggcggccgctgaagctcgaaaaacaaagaaaaaaatcaaagggattcagcaagccactgcaggagtctcacaagacacttcggaaaatcctaacaaaacaatagttcctgcagcattaccacagctcacccctaccttggtgtcactgctggaggtgattgaacccgaggtgttgtatgcaggatatgatagctctgttccagattcagcatggagaattatgaccacactcaacatgttaggtgggcgtcaagtgattgcagcagtgaaatgggcaaaggcgataccaggcttcagaaacttacacctggatgaccaaatgaccctgctacagtactcatggatgtttctcatggcatttgccctgggttggagatcatacagacaatcaagtggaaacctgctctgctttgctcctgatctgattattaatgagcagagaatgtctctaccctgcatgtatgaccaatgtaaacacatgctgtttgtctcctctgaattacaaagattgcaggtatcctatgaagagtatctctgtatgaaaaccttactgcttctctcctcagttcctaaggaaggtctgaagagccaagagttatttgatgagattcgaatgacttatatcaaagagctaggaaaagccatcgtcaaaagggaagggaactccagtcagaactggcaacggttttaccaactgacaaagcttctggactccatgcatgaggtggttgagaatctccttacctactgcttccagacatttttggataagaccatgagtattgaattcccagagatgttagctgaaatcatcactaatcagataccaaaatattcaaatggaaatatcaaaaagcttctgtttcatcaaaaatctagacaggcctcgtaccggatcctctag

SEQ ID NO: 745 - DNA, 1728 bp, Artificial Sequence
  Artificial sequence
  P25174
atgaaccttgaagctcgaaaaacaaagaaaaaaatcaaagggattcagcaagccactgcaggagtctcacaagacacttcggaaaatcctaacaaaacaatagttcctgcagcattaccacagctcacccctaccttggtgtcactgctggaggtgattgaacccgaggtgttgtatgcaggatatgatagctctgttccagattcagcatggagaattatgaccacactcaacatgttaggtgggcgtcaagtgattgcagcagtgaaatgggcaaaggcgataccaggcttcagaaacttacacctggatgaccaaatgaccctgctacagtactcatggatgtttctcatggcatttgccctgggttggagatcatacagacaatcaagtggaaacctgctctgctttgctcctgatctgattattaatgagcagagaatgtctctaccctgcatgtatgaccaatgtaaacacatgctgtttgtctcctctgaattacaaagattgcaggtatcctatgaagagtatctctgtatgaaaaccttactgcttctctcctcagttcctaaggaaggtctgaagagccaagagttatttgatgagattcgaatgacttatatcaaagagctaggaaaagccatcgtcaaaagggaagggaactccagtcagaactggcaacggttttaccaactgacaaagcttctggactccatgcatgaggtggttgagaatctccttacctactgcttccagacatttttggataagaccatgagtattgaattcccagagatgttagctgaaatcatcactaatcagataccaaaatattcaaatggaaatatcaaaaagcttctgtttcatcaaaaaggtaccatggaagttagagagaagaaagatgagaaaatggagatgacaagaagaaaatcatcagctctagatcatcatcgtcttcctccgtacacttactcccaaaccgccaacaaagagaaacccaccaccaaaagaaacgggtcggacccggatccggatccggatcttgatactaacccaatttctatatctcatgctccaagatcatacgctaggcctcaaactacttctccggggaaggcaaggtatagagaatgccaaaagaatcacgcggcgagctccggtggacacgttgtcgacggttgcggcgagtttatgtcttccggggaagaaggcacggtggagtctcttctttgtgcagcttgtgattgccaccggagcttccatagaaaagagatcgatggtttgtttgttgtcaatttcaatagctttggccattcacagagaccactcggaagccgccacgtgtctccgataatgatgagttttggtggtggtggtggttgtgcggcggagtcatcgacggaggatctaaacaagtttcatcaatcttttagtggttatggagtggatcagtttcatcattatcaacccaagaaacggtttaggacaaagtttaatgaagaacagaaggagaagatgatggagtttgctgagaagattggttggagaatgacaaaactagaagatgatgaagtgaatcggttttgtcgtgagattaaagttaaaagacaagtgtttaaagtttggatgcacaacaataaacaagcagcaaagaagaaggatttgtaagagatttctatatatatatatatactatttttacttctctttgttcaacattgctttaac

SEQ ID NO: 746 - DNA, 1200 bp, Artificial Sequence
  Artificial sequence
  P25173
atgcccaattttaatcaaagtgggaatattgctgatagctcattgtccttcactttcactaacagtagcaacggtccgaacctcataacaactcaaacaaattctcaagcgctttcacaaccaattgcctcctctaacgttcatgataacttcatgaataatgaaatcacggctagtaaaattgatgatggtaataattcaaaaccactgtcacctggttggacggaccaaactgcgtataacgcgtttggaatcactacagggatgtttaataccactacaatggatgatgtatataactatctattcgatgatgaagataccccaccaaacccaaaaaaagagggtaccatggaagttagagagaagaaagatgagaaaatggagatgacaagaagaaaatcatcagctctagatcatcatcgtcttcctccgtacacttactcccaaaccgccaacaaagagaaacccaccaccaaaagaaacgggtcggacccggatccggatccggatcttgatactaacccaatttctatatctcatgctccaagatcatacgctaggcctcaaactacttctccggggaaggcaaggtatagagaatgccaaaagaatcacgcggcgagctccggtggacacgttgtcgacggttgcggcgagtttatgtcttccggggaagaaggcacggtggagtctcttctttgtgcagcttgtgattgccaccggagcttccatagaaaagagatcgatggtttgtttgttgtcaatttcaatagctttggccattcacagagaccactcggaagccgccacgtgtctccgataatgatgagttttggtggtggtggtggttgtgcggcggagtcatcgacggaggatctaaacaagtttcatcaatcttttagtggttatggagtggatcagtttcatcattatcaacccaagaaacggtttaggacaaagtttaatgaagaacagaaggagaagatgatggagtttgctgagaagattggttggagaatgacaaaactagaagatgatgaagtgaatcggttttgtcgtgagattaaagttaaaagacaagtgtttaaagtttggatgcacaacaataaacaagcagcaaagaagaaggatttgtaagagatttctatatatatatatatactatttttacttctctttgttcaacattgctttaac

SEQ ID NO: 747 - DNA, 1245 bp, Artificial Sequence
  Artificial sequence
  P25147
gcttagggttttggagagagattactaagaaagttttaatgtttgtttaagagaaaagttatatattagggttttctttattcagaagcttcaagatcagaaaagatggaagttagagagaagaaagatgagaaaatggagatgacaagaagaaaatcatcagctctagatcatcatcgtcttcctccgtacacttactcccaaaccgccaacaaagagaaacccaccaccaaaagaaacgggtcggacccggatccggatccggatcttgatactaacccaatttctatatctcatgctccaagatcatacgctaggcctcaaactacttctccggggaaggcaaggtatagagaatgccaaaagaatcacgcggcgagctccggtggacacgttgtcgacggttgcggcgagtttatgtcttccggggaagaaggcacggtggagtctcttctttgtgcagcttgtgattgccaccggagcttccatagaaaagagatcgatggtttgtttgttgtcaatttcaatagctttggccattcacagagaccactcggaagccgccacgtgtctccgataatgatgagttttggtggtggtggtggttgtgcggcggagtcatcgacggaggatctaaacaagtttcatcaatcttttagtggttatggagtggatcagtttcatcattatcaacccaagaaacggtttaggacaaagtttaatgaagaacagaaggagaagatgatggagtttgctgagaagattggttggagaatgacaaaactagaagatgatgaagtgaatcggttttgtcgtgagattaaagttaaaagacaagtgtttaaagtttggatgcacaacaataaacaagcagcaaagaagaaggatttgtgcggccgccccaattttaatcaaagtgggaatattgctgatagctcattgtccttcactttcactaacagtagcaacggtccgaacctcataacaactcaaacaaattctcaagcgctttcacaaccaattgcctcctctaacgttcatgataacttcatgaataatgaaatcacggctagtaaaattgatgatggtaataattcaaaaccactgtcacctggttggacggaccaaactgcgtataacgcgtttggaatcactacagggatgtttaataccactacaatggatgatgtatataactatctattcgatgatgaagataccccaccaaacccaaaaaaagagtag

SEQ ID NO: 748 - DNA, 1530 bp, Artificial Sequence
  Artificial sequence
  P25275
atggaagttagagagaagaaagatgagaaaatggagatgacaagaagaaaatcatcagctctagatcatcatcgtcttcctccgtacacttactcccaaaccgccaacaaagagaaacccaccaccaaaagaaacgggtcggacccggatccggatccggatcttgatactaacccaatttctatatctcatgctccaagatcatacgctaggcctcaaactacttctccggggaaggcaaggtatagagaatgccaaaagaatcacgcggcgagctccggtggacacgttgtcgacggttgcggcgagtttatgtcttccggggaagaaggcacggtggagtctcttctttgtgcagcttgtgattgccaccggagcttccatagaaaagagatcgatggtttgtttgttgtcaatttcaatagctttggccattcacagagaccactcggaagccgccacgtgtctccgataatgatgagttttggtggtggtggtggttgtgcggcggagtcatcgacggaggatctaaacaagtttcatcaatcttttagtggttatggagtggatcagtttcatcattatcaacccaagaaacggtttaggacaaagtttaatgaagaacagaaggagaagatgatggagtttgctgagaagattggttggagaatgacaaaactagaagatgatgaagtgaatcggttttgtcgtgagattaaagttaaaagacaagtgtttaaagtttggatgcacaacaataaacaagcagcaaagaagaaggatttgtgcggccgcatggtgagcaagggcgaggagctgttcaccggggtggtgcccatcctggtcgagctggacggcgacgtaaacggccacaagttcagcgtgtccggcgagggcgagggcgatgccacctacggcaagctgaccctgaagttcatctgcaccaccggcaagctgcccgtgccctggcccaccctcgtgaccaccctgacctacggcgtgcagtgcttcagccgctaccccgaccacatgaagcagcacgacttcttcaagtccgccatgcccgaaggctacgtccaggagcgcaccatcttcttcaaggacgacggcaactacaagacccgcgccgaggtgaagttcgagggcgacaccctggtgaaccgcatcgagctgaagggcatcgacttcaaggaggacggcaacatcctggggcacaagctggagtacaactacaacagccacaacgtctatatcatggccgacaagcagaagaacggcatcaaggtgaacttcaagatccgccacaacatcgaggacggcagcgtgcagctcgccgaccactaccagcagaacacccccatcggcgacggccccgtgctgctgcccgacaaccactacctgagcacccagtccgccctgagcaaagaccccaacgagaagcgcgatcacatggtcctgctggagttcgtgaccgccgccgggatcactctcggcatggacgagctgtacaagtccggagggatcctctag

SEQ ID NO: 749 - DNA, 954 bp, Artificial Sequence
  Artificial sequence
  P15277
gcttagggttttggagagagattactaagaaagttttaatgtttgtttaagagaaaagttatatattagggttttctttattcagaagcttcaagatcagaaaagatggaagttagagagaagaaagatgagaaaatggagatgacaagaagaaaatcatcagctctagatcatcatcgtcttcctccgtacacttactcccaaaccgccaacaaagagaaacccaccaccaaaagaaacgggtcggacccggatccggatccggatcttgatactaacccaatttctatatctcatgctccaagatcatacgctaggcctcaaactacttctccggggaaggcaaggtatagagaatgccaaaagaatcacgcggcgagctccggtggacacgttgtcgacggttgcggcgagtttatgtcttccggggaagaaggcacggtggagtctcttctttgtgcagcttgtgattgccaccggagcttccatagaaaagagatcgatggtttgtttgttgtcaatttcaatagctttggccattcacagagaccactcggaagccgccacgtgtctccgataatgatgagttttggtggtggtggtggttgtgcggcggagtcatcgacggaggatctaaacaagtttcatcaatcttttagtggttatggagtggatcagtttcatcattatcaacccaagaaacggtttaggacaaagtttaatgaagaacagaaggagaagatgatggagtttgctgagaagattggttggagaatgacaaaactagaagatgatgaagtgaatcggttttgtcgtgagattaaagttaaaagacaagtgtttaaagtttggatgcacaacaataaacaagcagcaaagaagaaggatttgtaagagatttctatatatatatatatactatttttacttctctttgttcaacattgctttaac

SEQ ID NO: 750 - DNA, 954 bp, Artificial Sequence
  Artificial sequence
  P25737
gcttagggttttggagagagattactaagaaagttttaatgtttgtttaagagaaaagttatatattagggttttctttattcagaagcttcaagatcagaaaagatggaagttagagagaagaaagatgagaaaatggagatgacaagaagaaaatcatcagctctagatcatcatcgtcttcctccgtacacttactcccaaaccgccaacaaagagaaacccaccaccaaaagaaacgggtcggacccggatccggatccggatcttgatactaacccaatttctatatctcatgctccaagatcatacgctaggcctcaaactacttctccggggaaggcaaggtatagagaatgccaaaagaatcacgcggcgagctccggtggacacgttgtcgacggttgcggcgagtttatgtcttccggggaagaaggcacggtggagtctcttctttgtgcagcttgtgattgccaccggagcttccatagaaaagagatcgatggtttgtttgttgtcaatttcaatagctttggccattcacagagaccactcggaagccgccacgtgtctccgataatgatgagttttggtggtggtggtggttgtgcggcggagtcatcgacggaggatctaaacaagtttcatcaatcttttagtggttatggagtggatcagtttcatcattatcaacccaagaaacggtttaggacaaagtttaatgaagaacagaaggagaagatgatggagtttgctgagaagattggttggagaatgacaaaactagaagatgatgaagtgaatcggttttgtcgtgagattaaagttaaaagacaagtgtttaaagttgggatgcacaacaataaacaagcagcaaagaagaaggatttgtaagagatttctatatatatatatatactatttttacttctctttgttcaacattgctttaac

SEQ ID NO: 751 - DNA, 954 bp, Artificial Sequence
  Artificial sequence
  P25736
gcttagggttttggagagagattactaagaaagttttaatgtttgtttaagagaaaagttatatattagggttttctttattcagaagcttcaagatcagaaaagatggaagttagagagaagaaagatgagaaaatggagatgacaagaagaaaatcatcagctctagatcatcatcgtcttcctccgtacacttactcccaaaccgccaacaaagagaaacccaccaccaaaagaaacgggtcggacccggatccggatccggatcttgatactaacccaatttctatatctcatgctccaagatcatacgctaggcctcaaactacttctccggggaaggcaaggtatagagaatgccaaaagaatcacgcggcgagctccggtggacacgttgtcgacggttgcggcgagtttatgtcttccggggaagaaggcacggtggagtctcttctttgtgcagcttgtgatggcctcctgagcttccatagaaaagagatcgatggtttgtttgttgtcaatttcaatagctttggccattcacagagaccactcggaagccgccacgtgtctccgataatgatgagttttggtggtggtggtggttgtgcggcggagtcatcgacggaggatctaaacaagtttcatcaatcttttagtggttatggagtggatcagtttcatcattatcaacccaagaaacggtttaggacaaagtttaatgaagaacagaaggagaagatgatggagtttgctgagaagattggttggagaatgacaaaactagaagatgatgaagtgaatcggttttgtcgtgagattaaagttaaaagacaagtgtttaaagtttggatgcacaacaataaacaagcagcaaagaagaaggatttgtaagagatttctatatatatatatatactatttttacttctctttgttcaacattgctttaac

SEQ ID NO: 752 - DNA, 1470 bp, Artificial Sequence
  Artificial sequence
  P25191
gcttagggttttggagagagattactaagaaagttttaatgtttgtttaagagaaaagttatatattagggttttctttattcagaagcttcaagatcagaaaagatggaagttagagagaagaaagatgagaaaatggagatgacaagaagaaaatcatcagctctagatcatcatcgtcttcctccgtacacttactcccaaaccgccaacaaagagaaacccaccaccaaaagaaacgggtcggacccggatccggatccggatcttgatactaacccaatttctatatctcatgctccaagatcatacgctaggcctcaaactacttctccggggaaggcaaggtatagagaatgccaaaagaatcacgcggcgagctccggtggacacgttgtcgacggttgcggcgagtttatgtcttccggggaagaaggcacggtggagtctcttctttgtgcagcttgtgattgccaccggagcttccatagaaaagagatcgatggtttgtttgttgtcaatttcaatagctttggccattcacagagaccactcggaagccgccacgtgtctccgataatgatgagttttggtggtggtggtggttgtgcggcggagtcatcgacggaggatctaaacaagtttcatcaatcttttagtggttatggagtggatcagtttcatcattatcaacccaagaaacggtttaggacaaagtttaatgaagaacagaaggagaagatgatggagtttgctgagaagattggttggagaatgacaaaactagaagatgatgaagtgaatcggttttgtcgtgagattaaagttaaaagacaagtgtttaaagtttggatgcacaacaataaacaagcagcaaagacgaaggatttggcggccgctgccgctgcggcagcggccatggaaaagagaagatggaaaaagaatttcatagccgtctcagcagccaaccgctttaagaaaatctcatcctccggggcacttgattatgatattccaactactgctagcgagaatttgtattttcagggtgagctcaaaaccgcggctcttgcgcaacacgatgaagccgtggacaacaaattcaacaaagaacaacaaaacgcgttctatgagatcttacatttacctaacttaaacgaagaacaacgaaacgccttcatccaaagtttaaaagatgacccaagccaaagcgctaaccttttagcagaagctaaaaagctaaatgatgctcaggcgccgaaagtagacaacaaattcaacaaagaacaacaaaacgcgttctatgagatcttacatttacctaacttaaacgaagaacaacgaaacgccttcatccaaagtttaaaagatgacccaagccaaagcgctaaccttttagcagaagctaaaaagctaaatggtgctcaggcgccgaaagtagacgcgaattccgcggggaagtcaacctga

SEQ ID NO: 753 - DNA, 954 bp, Artificial Sequence; identical to SEQ ID NO: 749
  Artificial sequence
  P8587

SEQ ID NO: 754 - DNA, 1332 bp, Artificial Sequence
  Artificial sequence
  P25190
gcttagggttttggagagagattactaagaaagttttaatgtttgtttaagagaaaagttatatattagggttttctttattcagaagcttcaagatcagaaaagatggaagttagagagaagaaagatgagaaaatggagatgacaagaagaaaatcatcagctctagatcatcatcgtcttcctccgtacacttactcccaaaccgccaacaaagagaaacccaccaccaaaagaaacgggtcggacccggatccggatccggatcttgatactaacccaatttctatatctcatgctccaagatcatacgctaggcctcaaactacttctccggggaaggcaaggtatagagaatgccaaaagaatcacgcggcgagctccggtggacacgttgtcgacggttgcggcgagtttatgtcttccggggaagaaggcacggtggagtctcttctttgtgcagcttgtgattgccaccggagcttccatagaaaagagatcgatggtttgtttgttgtcaatttcaatagctttggccattcacagagaccactcggaagccgccacgtgtctccgataatgatgagttttggtggtggtggtggttgtgcggcggagtcatcgacggaggatctaaacaagtttcatcaatcttttagtggttatggagtggatcagtttcatcattatcaacccaagaaacggtttaggacaaagtttaatgaagaacagaaggagaagatgatggagtttgctgagaagattggttggagaatgacaaaactagaagatgatgaagtgaatcggttttgtcgtgagattaaagttaaaagacaagtgtttaaagtttggatgcacaacaataaacaagcagcaaagacgaaggatttggcggccgcggctgccgccgcagccgctgctagttacccatacgatgttcctgactatgcgggctatccctatgacgtcccggactatgcaggatcctatccatatgacgttccggattacgcttctagatacccatacgatgttcctgactatgcgggctatccctatgacgtcccggactatgcaggatcctatccatatgacgttccagattacgctactagttacccatacgatgttcctgactatgcgggctatccctatgacgtcccggactatgcaggatcctatccatatgacgttccagattacgcttctagatacccatacgatgttcctgactatgcgggctatccctatgacgtcccggactatgcaggatcctatccatatgacgttccagattacgctactagacaggcctcgtaccagatcctctag

SEQ ID NO: 755 - DNA, 1311 bp, Artificial Sequence
  Artificial sequence
  P26260
atgagttacccatacgatgttcctgactatgcgggctatccctatgacgtcccggactatgcaggatcctatccatatgacgttccagattacgcttctagatacccatacgatgttcctgactatgcgggctatccctatgacgtcccggactatgcaggatcctatccatatgacgttccagattacgctactagttacccatacgatgttcctgactatgcgggctatccctatgacgtcccggactatgcaggatcctatccatatgacgttccagattacgcttctagatacccatacgatgttcctgactatgcgggctatccctatgacgtcccggactatgcaggatcctatccatatgacgttccagattacgctactagacaggcctcgtaccggatcctctacctagagaattccgccgctgccgctgcggcagcggctgcagcgggtaccatggaagttagagagaagaaagatgagaaaatggagatgacaagaagaaaatcatcagctctagatcatcatcgtcttcctccgtacacttactcccaaaccgccaacaaagagaaacccaccaccaaaagaaacgggtcggacccggatccggatccggatcttgatactaacccaatttctatatctcatgctccaagatcatacgctaggcctcaaactacttctccggggaaggcaaggtatagagaatgccaaaagaatcacgcggcgagctccggtggacacgttgtcgacggttgcggcgagtttatgtcttccggggaagaaggcacggtggagtctcttctttgtgcagcttgtgattgccaccggagcttccatagaaaagagatcgatggtttgtttgttgtcaatttcaatagctttggccattcacagagaccactcggaagccgccacgtgtctccgataatgatgagttttggtggtggtggtggttgtgcggcggagtcatcgacggaggatctaaacaagtttcatcaatcttttagtggttatggagtggatcagtttcatcattatcaacccaagaaacggtttaggacaaagtttaatgaagaacagaaggagaagatgatggagtttgctgagaagattggttggagaatgacaaaactagaagatgatgaagtgaatcggttttgtcgtgagattaaagttaaaagacaagtgtttaaagtttggatgcacaacaataaacaagcagcaaagaagaaggatttgtaagagatttctatatatatatatatactatttttacttctctttgttcaacattgctttaac

SEQ ID NO: 756 - DNA, 821 bp, Artificial Sequence
  Artificial sequence
  P23554
tcctcccctctaacaataagcagcatctctataatccctaagattcacaatggagcttggaggaaaatgcaatgcaattacaaccacaacaatgatctcaacagaagtaaagccacatacggatccggaaccagaagccaaacccgaatcagatccatccatggctttattcccgatcaagaaagaaaaccaaaaaccaaagacacgtgtcgaccaaggagctaagtaccgggaatgtcagaagaaccacgcggcctcaaccggaggacacgtggtggacggatgctgcgagttcatggccggcggagaagaaggtacactcggtgctttaaaatgcgccgcctgtaactgtcaccggagcttccaccggaaagaagtgtacggacacaggaacagtaaacaagatcatcagctgatgataactccggcgttttacagcagtaacagctcgtacaagccacgtgtaatgcatccaacgggtgagattggacggaggacttcatcttcaagcgaggatatgaagaagattctgagtcatcgtaaccaaaacgttgatgggaaaagtttgatgatgatgatgatgaggaagaagaagagagtgaggacaaagatcaatgaagaacaaaaggagaagatgaaggaatttgcagagagattagggtggaggatgcagaagaaagatgaagaagagattgataagttttgtaggatggtgaatctgaggagacaagtttttaaggtttggatgcataataacaagcaagcaatgaagagaaacaatagtaacattagtgaatagtttgatgatctgataaaagtga

SEQ ID NO: 757 - DNA, 870 bp, Artificial Sequence
  Artificial sequence
  P2433
gaactcattttctctcttcttcttcatcatcatcatcaatggatgagataaaaccaaagaaagaagagaattccaaacgacgtcgtaacgtcaaacccatttgccgtgaaactggagaccacgtccattatcttccaacatgcaaaaccaagcccaaacccacgcgtactcatcacgcgccaccaccgatcctcgactcaatcttcaaagtcactcacaagccacactactacgaatgcaggaagaatcacgccgctgatatcggaaccaccgcttacgacggctgcggcgagtttgttagctccaccggtgaagaagattctttaaactgcgccgcatgtggctgtcaccgtaacttccaccgtgaagagttaatcccggagaacggcggcgttactgagacggttcttgaagttctcaagatttcatcgtgtcagtttcgtcggatcttttgctcaccttacggcggtggaaaaagcgaaggaaagaagaagaagaaggagaaggagagttatggaggggatccgataattaaagatcgattcggcggtgcggaggaggaggaggggatagtgaagaggttgaaaacgaagttcacggcggagcaaacggagaaaatgagggattatgcggagaagcttcggtggaaggtgagacctgagaggcaggaggaggttgaagagttttgtgtagagattggagtgaatcggaagaattttaggatttggatgaataatcacaaggataaaattataattgatgaatgattatttaccaaacttaattgtgttacttttcttttcattctactttgttttaatttgtgtttgatttagtgtaatgtataaataacaagctcattattggcta

SEQ ID NO: 758 - DNA, 625 bp, Artificial Sequence
  Artificial sequence
  P15113
aaacaaagtctctctcttctaattagagagccaagaagatgcagagtacttgtgtctacagagaatgcatgcgcaaccacgccgcgaagctcggctcttacgccatcgatggctgccgtgaatactctcaaccatccaccggcgatctctgcgtcgcctgtggttgccaccgcagctaccaccgtcgtatagacgtcatatcttctcctcaaatcaatcacacgcgcttcccgttcacgagcttaaggcgcgtgaagcagctggcgaggctgaaatggaaaacggctgaggaaagaaatgaggaggaggaggatgacacggaggagacttcgacggaagagaagatgacggtgcagaggcggaggaagtcaaagttcacggcggagcagagagaggcgatgaaagattacgcggcgaagttgggatggacgttgaaggataagagagcgcttagagaagagataagagtcttctgtgaagggattggtgttactcgttatcattttaaaacttgggttaacaataataaaaagttttatcactaactaattaactaatatccttaattgagataatactataatttagttccaatttcattttcatcccttctgtgttaatttct

SEQ ID NO: 759 - DNA, 964 bp, Artificial Sequence
  Artificial sequence
  P2712
gcgttttctcattcgacgatttctggatttggggatttcaaaaccatgaggaagaagctcgatactcggttcccagctgctcgtattaaaaagattatgcaagctgatgaggatgttggcaagatagctttggcagtgcctgtcttagtctcaaaatctttggagttgttcttgcaagacctttgtgatcgtacatatgaaattacccttgaaagaggtgccaagactgtgagctcattgcacctaaaacattgtgtggaaagatataacgtgtttgattttctgagggaagttgtgagtaaggtgcctgactatggccattcccaagggcaaggacatggtgatgttaccatggatgatcgcagcatctccaagagaaggaagcccatcagcgatgaagtgaatgacagtgacgaggaatataagaaaagcaaaacgcaagagatagggagtgctaagaccagtggcaggggtggtagaggaagagggcgaggaagaggtcgtggtggacgagctgcaaaagcagccgaaagagagggtctcaaccgcgagatggaagtagaagccgccaattctggacagccaccaccagaagacaatgtcaagatgcatgcgtcagagtcatcaccacaagaggatgagaagaaaggcatcgacggcacagcagcatcgaacgaagacaccaagcaacaccttcaaagtcccaaagaaggcattgactttgatctcaacgctgaatccctcgacctaaacgagaccaaactggcaccagccacaggcacaaccacaaccacaactgcagcaacagactctgaggagtattcgggctggcctatgatggacataagcaaaatggatccagcacagcttgctagtctgggtaagaggatagacgaggatgaggaagattatgacgaagaaggctaagtcataacagcactataggatatatagagtagcagcg

SEQ ID NO: 760 - DNA, 1626 bp, Artificial Sequence
  Artificial sequence
  P26055
atgaggaagaagctcgatactcggttcccagctgctcgtattaaaaagattatgcaagctgatgaggatgttggcaagatagctttggcagtgcctgtcttagtctcaaaatctttggagttgttcttgcaagacctttgtgatcgtacatatgaaattacccttgaaagaggtgccaagactgtgagctcattgcacctaaaacattgtgtggaaagatataacgtgtttgattttctgagggaagttgtgagtaaggtgcctgactatggccattcccaagggcaaggacatggtgatgttaccatggatgatcgcagcatctccaagagaaggaagcccatcagcgatgaagtgaatgacagtgacgaggaatataagaaaagcaaaacgcaagagatagggagtgctaagaccagtggcaggggtggtagaggaagagggcgaggaagaggtcgtggtggacgagctgcaaaagcagccgaaagagagggtctcaaccgcgagatggaagtagaagccgccaattctggacagccaccaccagaagacaatgtcaagatgcatgcgtcagagtcatcaccacaagaggatgagaagaaaggcatcgacggcacagcagcatcgaacgaagacaccaagcaacaccttcaaagtcccaaagaaggcattgactttgatctcaacgctgaatccctcgacctaaacgagaccaaactggcaccagccacaggcacaaccacaaccacaactgcagcaacagactctgaggagtattcgggctggcctatgatggacataagcaaaatggatccagcacagcttgctagtctgggtaagaggatagacgaggatgaggaagattatgacgaagaaggcgcggccgctgccgctgcggcagcggccatggtgagcaagggcgaggagctgttcaccggggtggtgcccatcctggtcgagctggacggcgacgtaaacggccacaagttcagcgtgtccggcgagggcgagggcgatgccacctacggcaagctgaccctgaagttcatctgcaccaccggcaagctgcccgtgccctggcccaccctcgtgaccaccttcggctacggcctgcagtgcttcgcccgctaccccgaccacatgaagcagcacgacttcttcaagtccgccatgcccgaaggctacgtccaggagcgcaccatcttcttcaaggacgacggcaactacaagacccgcgccgaggtgaagttcgagggcgacaccctggataaccgaatcgagctgaagggcatcgacttcaaggaggacggcaacatcctggggcacaagctggagtacaactacaacagccacaacgtctatatcatggccgacaagcagaagaacggcatcaaggtgaacttcaagatccgccacaacatcgaggacggcagcgtgcagctcgccgaccactaccagcagaacacccccatcggcgacggccccgtggtgctgcccgacaaccactacctgagctaccagtccgccctgagcaaagaccccaacgagaagcgcgatcacatggtcctgctggagttcgtgaccgccgccgggatcactctcggcatggacgagctgtacaagtaa

SEQ ID NO: 761 - DNA, 2019 bp, Artificial Sequence
  Artificial sequence
  P25664
atgaaccttgaagctcgaaaaacaaagaaaaaaatcaaagggattcagcaagccactgcaggagtctcacaagacacttcggaaaatcctaacaaaacaatagttcctgcagcattaccacagctcacccctaccttggtgtcactgctggaggtgattgaacccgaggtgttgtatgcaggatatgatagctctgttccagattcagcatggagaattatgaccacactcaacatgttaggtgggcgtcaagtgattgcagcagtgaaatgggcaaaggcgataccaggcttcagaaacttacacctggatgaccaaatgaccctgctacagtactcatggatgtttctcatggcatttgccctgggttggagatcatacagacaatcaagtggaaacctgctctgctttgctcctgatctgattattaatgagcagagaatgtctctaccctgcatgtatgaccaatgtaaacacatgctgtttgtctcctctgaattacaaagattgcaggtatcctatgaagagtatctctgtatgaaaaccttactgcttctctcctcagttcctaaggaaggtctgaagagccaagagttatttgatgagattcgaatgacttatatcaaagagctaggaaaagccatcgtcaaaagggaagggaactccagtcagaactggcaacggttttaccaactgacaaagcttctggactccatgcatgaggtggttgagaatctccttacctactgcttccagacatttttggataagaccatgagtattgaattcccagagatgttagctgaaatcatcactaatcagataccaaaatattcaaatggaaatatcaaaaagcttctgtttcatcaaaaaggtaccatggaatcagaattccagcaacatcacttccttctccacgatcatcaacaccagagaccaagaaactcaggattgattcgttaccaatcagcaccaagttcgtacttttcgagtttcggtgaatcaatcgaagagtttttagatcgacccacaagtcctgaaactgagcgaatcttatctggctttttacaaaccaccgacacaagcgacaacgttgatagtttccttcaccatacttttaacagtgatggaactgagaagaaacctccggaagttaaaacagaggacgaagatgctgaaattccggtgactgcgacggcgacggcgatggaggttgttgtttccggtgatggtgaaatctcagtgaatcctgaagtatcgattgggtatgtggcttcggtttcgaggaataagagaccaagagagaaagatgatcggactccggtgaataatctagctcgtcataatagttcaccggccggattattttcatccattgatgttgaaacagcttatgcagctgtaatgaaaagtatgggaggttttggaggaagtaatgtgatgagtacaagcaatactgaagcttcgtctcttactcctagaagcaagttacttcctcctacttctagagcgatgagtccgatctctgaggttgatgttaaacccggtttctcgtctagattgcctcctcggacgctttccggtgggtttaatcgttcttttgggaatgaagggtctgcttcttccaagcttacagctcttgctaggacccaatctggaggtctagatcaatacaaaaccaaggatgaggattcagcaagtagacgtcctcctttggcacatcacatgagtttgcccaagtctttatcagatattgaacagttactgtcagattctatcccatgtaagatcagagccaagcggggttgtgcaactcatcctcgaagcatagccgagagggtgagaagaaccaagatcagtgaaagaatgaggaagctgcaagaccttgttccaaacatggacacgcaaacaaacacagcagacatgttggatcttgcggttcaatacatcaaggacctgcaagaacaagtgaaggcgctcgaagagagtcgggcaagatgtagatgctctagtgcgtga

SEQ ID NO: 762 - DNA, 1491 bp, Artificial Sequence
  Artificial sequence
  P25662
atgcccaattttaatcaaagtgggaatattgctgatagctcattgtccttcactttcactaacagtagcaacggtccgaacctcataacaactcaaacaaattctcaagcgctttcacaaccaattgcctcctctaacgttcatgataacttcatgaataatgaaatcacggctagtaaaattgatgatggtaataattcaaaaccactgtcacctggttggacggaccaaactgcgtataacgcgtttggaatcactacagggatgtttaataccactacaatggatgatgtatataactatctattcgatgatgaagataccccaccaaacccaaaaaaagagggtaccatggaatcagaattccagcaacatcacttccttctccacgatcatcaacaccagagaccaagaaactcaggattgattcgttaccaatcagcaccaagttcgtacttttcgagtttcggtgaatcaatcgaagagtttttagatcgacccacaagtcctgaaactgagcgaatcttatctggctttttacaaaccaccgacacaagcgacaacgttgatagtttccttcaccatacttttaacagtgatggaactgagaagaaacctccggaagttaaaacagaggacgaagatgctgaaattccggtgactgcgacggcgacggcgatggaggttgttgtttccggtgatggtgaaatctcagtgaatcctgaagtatcgattgggtatgtggcttcggtttcgaggaataagagaccaagagagaaagatgatcggactccggtgaataatctagctcgtcataatagttcaccggccggattattttcatccattgatgttgaaacagcttatgcagctgtaatgaaaagtatgggaggttttggaggaagtaatgtgatgagtacaagcaatactgaagcttcgtctcttactcctagaagcaagttacttcctcctacttctagagcgatgagtccgatctctgaggttgatgttaaacccggtttctcgtctagattgcctcctcggacgctttccggtgggtttaatcgttcttttgggaatgaagggtctgcttcttccaagcttacagctcttgctaggacccaatctggaggtctagatcaatacaaaaccaaggatgaggattcagcaagtagacgtcctcctttggcacatcacatgagtttgcccaagtctttatcagatattgaacagttactgtcagattctatcccatgtaagatcagagccaagcggggttgtgcaactcatcctcgaagcatagccgagagggtgagaagaaccaagatcagtgaaagaatgaggaagctgcaagaccttgttccaaacatggacacgcaaacaaacacagcagacatgttggatcttgcggttcaatacatcaaggacctgcaagaacaagtgaaggcgctcgaagagagtcgggcaagatgtagatgctctagtgcgtga

SEQ ID NO: 763 - DNA, 1499 bp, Artificial Sequence
  Artificial sequence
  P25660
atggaatcagaattccagcaacatcacttccttctccacgatcatcaacaccagagaccaagaaactcaggattgattcgttaccaatcagcaccaagttcgtacttttcgagtttcggtgaatcaatcgaagagtttttagatcgacccacaagtcctgaaactgagcgaatcttatctggctttttacaaaccaccgacacaagcgacaacgttgatagtttccttcaccatacttttaacagtgatggaactgagaagaaacctccggaagttaaaacagaggacgaagatgctgaaattccggtgactgcgacggcgacggcgatggaggttgttgtttccggtgatggtgaaatctcagtgaatcctgaagtatcgattgggtatgtggcttcggtttcgaggaataagagaccaagagagaaagatgatcggactccggtgaataatctagctcgtcataatagttcaccggccggattattttcatccattgatgttgaaacagcttatgcagctgtaatgaaaagtatgggaggttttggaggaagtaatgtgatgagtacaagcaatactgaagcttcgtctcttactcctagaagcaagttacttcctcctacttctagagcgatgagtccgatctctgaggttgatgttaaacccggtttctcgtctagattgcctcctcggacgctttccggtgggtttaatcgttcttttgggaatgaagggtctgcttcttccaagcttacagctcttgctaggacccaatctggaggtctagatcaatacaaaaccaaggatgaggattcagcaagtagacgtcctcctttggcacatcacatgagtttgcccaagtctttatcagatattgaacagttactgtcagattctatcccatgtaagatcagagccaagcggggttgtgcaactcatcctcgaagcatagccgagagggtgagaagaaccaagatcagtgaaagaatgaggaagctgcaagaccttgttccaaacatggacacgcaaacaaacacagcagacatgttggatcttgcggttcaatacatcaaggacctgcaagaacaagtgaaggcgctcgaagagagtcgggcaagatgtagatgctctagtgcgtgcggccgccccaattttaatcaaagtgggaatattgctgatagctcattgtccttcactttcactaacagtagcaacggtccgaacctcataacaactcaaacaaattctcaagcgctttcacaaccaattgcctcctctaacgttcatgataacttcatgaataatgaaatcacggctagtaaaattgatgatggtaataattcaaaaccactgtcacctggttggacggaccaaactgcgtataacgcgtttggaatcactacagggatgtttaataccactacaatggatgatgtatataactatctattcgatgatgaagataccccaccaaacccaaaaaaagagtagtaagctag

SEQ ID NO: 764 - DNA, 1881 bp, Artificial Sequence
  Artificial sequence
  P25277
atggaatcagaattccagcaacatcacttccttctccacgatcatcaacaccagagaccaagaaactcaggattgattcgttaccaatcagcaccaagttcgtacttttcgagtttcggtgaatcaatcgaagagtttttagatcgacccacaagtcctgaaactgagcgaatcttatctggctttttacaaaccaccgacacaagcgacaacgttgatagtttccttcaccatacttttaacagtgatggaactgagaagaaacctccggaagttaaaacagaggacgaagatgctgaaattccggtgactgcgacggcgacggcgatggaggttgttgtttccggtgatggtgaaatctcagtgaatcctgaagtatcgattgggtatgtggcttcggtttcgaggaataagagaccaagagagaaagatgatcggactccggtgaataatctagctcgtcataatagttcaccggccggattattttcatccattgatgttgaaacagcttatgcagctgtaatgaaaagtatgggaggttttggaggaagtaatgtgatgagtacaagcaatactgaagcttcgtctcttactcctagaagcaagttacttcctcctacttctagagcgatgagtccgatctctgaggttgatgttaaacccggtttctcgtctagattgcctcctcggacgctttccggtgggtttaatcgttcttttgggaatgaagggtctgcttcttccaagcttacagctcttgctaggacccaatctggaggtctagatcaatacaaaaccaaggatgaggattcagcaagtagacgtcctcctttggcacatcacatgagtttgcccaagtctttatcagatattgaacagttactgtcagattctatcccatgtaagatcagagccaagcggggttgtgcaactcatcctcgaagcatagccgagagggtgagaagaaccaagatcagtgaaagaatgaggaagctgcaagaccttgttccaaacatggacacgcaaacaaacacagcagacatgttggatcttgcggttcaatacatcaaggacctgcaagaacaagtgaaggcgctcgaagagagtcgggcaagatgtagatgctctagtgcgtgcggccgcatggtgagcaagggcgaggagctgttcaccggggtggtgcccatcctggtcgagctggacggcgacgtaaacggccacaagttcagcgtgtccggcgagggcgagggcgatgccacctacggcaagctgaccctgaagttcatctgcaccaccggcaagctgcccgtgccctggcccaccctcgtgaccaccctgacctacggcgtgcagtgcttcagccgctaccccgaccacatgaagcagcacgacttcttcaagtccgccatgcccgaaggctacgtccaggagcgcaccatcttcttcaaggacgacggcaactacaagacccgcgccgaggtgaagttcgagggcgacaccctggtgaaccgcatcgagctgaagggcatcgacttcaaggaggacggcaacatcctggggcacaagctggagtacaactacaacagccacaacgtctatatcatggccgacaagcagaagaacggcatcaaggtgaacttcaagatccgccacaacatcgaggacggcagcgtgcagctcgccgaccactaccagcagaacacccccatcggcgacggccccgtgctgctgcccgacaaccactacctgagcacccagtccgccctgagcaaagaccccaacgagaagcgcgatcacatggtcctgctggagttcgtgaccgccgccgggatcactctcggcatggacgagctgtacaagtccggagggatcctctag

SEQ ID NO: 765 - DNA, 1436 bp, Artificial Sequence
  Artificial sequence
  P15046
acgaaacttccggtgtggtactgcaaacggagaaaaaaataaccaaagaagagagaaactcaaaagctactaagatggaatcagaattccagcaacatcacttccttctccacgatcatcaacaccagagaccaagaaactcaggattgattcgttaccaatcagcaccaagttcgtacttttcgagtttcggtgaatcaatcgaagagtttttagatcgacccacaagtcctgaaactgagcgaatcttatctggctttttacaaaccaccgacacaagcgacaacgttgatagtttccttcaccatacttttaacagtgatggaactgagaagaaacctccggaagttaaaacagaggacgaagatgctgaaattccggtgactgcgacggcgacggcgatggaggttgttgtttccggtgatggtgaaatctcagtgaatcctgaagtatcgattgggtatgtggcttcggtttcgaggaataagagaccaagagagaaagatgatcggactccggtgaataatctagctcgtcataatagttcaccggccggattattttcatccattgatgttgaaacagcttatgcagctgtaatgaaaagtatgggaggttttggaggaagtaatgtgatgagtacaagcaatactgaagcttcgtctcttactcctagaagcaagttacttcctcctacttctagagcgatgagtccgatctctgaggttgatgttaaacccggtttctcgtctagattgcctcctcggacgctttccggtgggtttaatcgttcttttgggaatgaagggtctgcttcttccaagcttacagctcttgctaggacccaatctggaggtctagatcaatacaaaaccaaggatgaggattcagcaagtagacgtcctcctttggcacatcacatgagtttgcccaagtctttatcagatattgaacagttactgtcagattctatcccatgtaagatcagagccaagcggggttgtgcaactcatcctcgaagcatagccgagagggtgagaagaaccaagatcagtgaaagaatgaggaagctgcaagaccttgttccaaacatggacacgcaaacaaacacagcagacatgttggatcttgcggttcaatacatcaaggacctgcaagaacaagtgaaggcgctcgaagagagtcgggcaagatgtagatgctctagtgcgtgaaactagaagtgggagtatgcgcgagtgctagccagggagggagttgtgcatagaagtatcggttcggcctttggagaaaagtcgaagatagcaaagtagagaagagatcatgaacaaagctaaatttggtggtggtggtgaaaagggtttttgtaaagttggaacctttttttggtagggaagaaagtagcaaggttgtgtaatggtccgaactccaatgct

SEQ ID NO: 766 - DNA, 2044 bp, Artificial Sequence
  Artificial sequence
  P26196
taagatggaatcagaattccagcaacatcacttccttctccacgatcatcaacaccagagaccaagaaactcaggattgattcgttaccaatcagcaccaagttcgtacttttcgagtttcggtgaatcaatcgaagagtttttagatcgacccacaagtcctgaaactgagcgaatcttatctggctttttacaaaccaccgacacaagcgacaacgttgatagtttccttcaccatacttttaacagtgatggaactgagaagaaacctccggaagttaaaacagaggacgaagatgctgaaattccggtgactgcgacggcgacggcgatggaggttgttgtttccggtgatggtgaaatctcagtgaatcctgaagtatcgattgggtatgtggcttcggtttcgaggaataagagaccaagagagaaagatgatcggactccggtgaataatctagctcgtcataatagttcaccggccggattattttcatccattgatgttgaaacagcttatgcagctgtaatgaaaagtatgggaggttttggaggaagtaatgtgatgagtacaagcaatactgaagcttcgtctcttactcctagaagcaagttacttcctcctacttctagagcgatgagtccgatctctgaggttgatgttaaacccggtttctcgtctagattgcctcctcggacgctttccggtgggtttaatcgttcttttgggaatgaagggtctgcttcttccaagcttacagctcttgctaggacccaatctggaggtctagatcaatacaaaaccaaggatgaggattcagcaagtagacgtcctcctttggcacatcacatgagtttgcccaagtctttatcagatattgaacagttactgtcagattctatcccatgtaagatcagagccaagcggggttgtgcaactcatcctcgaagcatagccgagagggtgagaagaaccaagatcagtgaaagaatgaggaagctgcaagaccttgttccaaacatggacacgcaaacaaacacagcagacatgttggatcttgcggttcaatacatcaaggacctgcaagaacaagtgaaggcgctcgaagagagtcgggcaagatgtagatgctctagtgcggcggccgctgaagctcgaaaaacaaagaaaaaaatcaaagggattcagcaagccactgcaggagtctcacaagacacttcggaaaatcctaacaaaacaatagttcctgcagcattaccacagctcacccctaccttggtgtcactgctggaggtgattgaacccgaggtgttgtatgcaggatatgatagctctgttccagattcagcatggagaattatgaccacactcaacatgttaggtgggcgtcaagtgattgcagcagtgaaatgggcaaaggcgataccaggcttcagaaacttacacctggatgaccaaatgaccctgctacagtactcatggatgtttctcatggcatttgccctgggttggagatcatacagacaatcaagtggaaacctgctctgctttgctcctgatctgattattaatgagcagagaatgtctctaccctgcatgtatgaccaatgtaaacacatgctgtttgtctcctctgaattacaaagattgcaggtatcctatgaagagtatctctgtatgaaaaccttactgcttctctcctcagttcctaaggaaggtctgaagagccaagagttatttgatgagattcgaatgacttatatcaaagagctaggaaaagccatcgtcaaaagggaagggaactccagtcagaactggcaacggttttaccaactgacaaagcttctggactccatgcatgaggtggttgagaatctccttacctactgcttccagacatttttggataagaccatgagtattgaattcccagagatgttagctgaaatcatcactaatcagataccaaaatattcaaatggaaatatcaaaaagcttctgtttcatcaaaaatctagacaggcctcgtaccggatcctctag

SEQ ID NO: 767 - DNA, 1436 bp, Artificial Sequence; identical to SEQ ID NO: 765
  Artificial sequence
  P8242

SEQ ID NO: 768 - DNA, 1720 bp, Artificial Sequence
  Artificial sequence
  P25756
taagatggaatcagaattccagcaacatcacttccttctccacgatcatcaacaccagagaccaagaaactcaggattgattcgttaccaatcagcaccaagttcgtacttttcgagtttcggtgaatcaatcgaagagtttttagatcgacccacaagtcctgaaactgagcgaatcttatctggctttttacaaaccaccgacacaagcgacaacgttgatagtttccttcaccatacttttaacagtgatggaactgagaagaaacctccggaagttaaaacagaggacgaagatgctgaaattccggtgactgcgacggcgacggcgatggaggttgttgtttccggtgatggtgaaatctcagtgaatcctgaagtatcgattgggtatgtggcttcggtttcgaggaataagagaccaagagagaaagatgatcggactccggtgaataatctagctcgtcataatagttcaccggccggattattttcatccattgatgttgaaacagcttatgcagctgtaatgaaaagtatgggaggttttggaggaagtaatgtgatgagtacaagcaatactgaagcttcgtctcttactcctagaagcaagttacttcctcctacttctagagcgatgagtccgatctctgaggttgatgttaaacccggtttctcgtctagattgcctcctcggacgctttccggtgggtttaatcgttcttttgggaatgaagggtctgcttcttccaagcttacagctcttgctaggacccaatctggaggtctagatcaatacaaaaccaaggatgaggattcagcaagtagacgtcctcctttggcacatcacatgagtttgcccaagtctttatcagatattgaacagttactgtcagattctatcccatgtaagatcagagccaagcggggttgtgcaactcatcctcgaagcatagccgagagggtgagaagaaccaagatcagtgaaagaatgaggaagctgcaagaccttgttccaaacatggacacgcaaacaaacacagcagacatgttggatcttgcggttcaatacatcaaggacctgcaagaacaagtgaaggcgctcgaagagagtcgggcaagatgtagatgctctagtgcggcggccgctgccgctgcggcagcggccatggaaaagagaagatggaaaaagaatttcatagccgtctcagcagccaaccgctttaagaaaatctcatcctccggggcacttgattatgatattccaactactgctagcgagaatttgtattttcagggtgagctcaaaaccgcggctcttgcgcaacacgatgaagccgtggacaacaaattcaacaaagaacaacaaaacgcgttctatgagatcttacatttacctaacttaaacgaagaacaacgaaacgccttcatccaaagtttaaaagatgacccaagccaaagcgctaaccttttagcagaagctaaaaagctaaatgatgctcaggcgccgaaagtagacaacaaattcaacaaagaacaacaaaacgcgttctatgagatcttacatttacctaacttaaacgaagaacaacgaaacgccttcatccaaagtttaaaagatgacccaagccaaagcgctaaccttttagcagaagctaaaaagctaaatggtgctcaggcgccgaaagtagacgcgaattccgcggggaagtcaacctga

SEQ ID NO: 769 - DNA, 1582 bp, Artificial Sequence
  Artificial sequence
  P25257
taagatggaatcagaattccagcaacatcacttccttctccacgatcatcaacaccagagaccaagaaactcaggattgattcgttaccaatcagcaccaagttcgtacttttcgagtttcggtgaatcaatcgaagagtttttagatcgacccacaagtcctgaaactgagcgaatcttatctggctttttacaaaccaccgacacaagcgacaacgttgatagtttccttcaccatacttttaacagtgatggaactgagaagaaacctccggaagttaaaacagaggacgaagatgctgaaattccggtgactgcgacggcgacggcgatggaggttgttgtttccggtgatggtgaaatctcagtgaatcctgaagtatcgattgggtatgtggcttcggtttcgaggaataagagaccaagagagaaagatgatcggactccggtgaataatctagctcgtcataatagttcaccggccggattattttcatccattgatgttgaaacagcttatgcagctgtaatgaaaagtatgggaggttttggaggaagtaatgtgatgagtacaagcaatactgaagcttcgtctcttactcctagaagcaagttacttcctcctacttctagagcgatgagtccgatctctgaggttgatgttaaacccggtttctcgtctagattgcctcctcggacgctttccggtgggtttaatcgttcttttgggaatgaagggtctgcttcttccaagcttacagctcttgctaggacccaatctggaggtctagatcaatacaaaaccaaggatgaggattcagcaagtagacgtcctcctttggcacatcacatgagtttgcccaagtctttatcagatattgaacagttactgtcagattctatcccatgtaagatcagagccaagcggggttgtgcaactcatcctcgaagcatagccgagagggtgagaagaaccaagatcagtgaaagaatgaggaagctgcaagaccttgttccaaacatggacacgcaaacaaacacagcagacatgttggatcttgcggttcaatacatcaaggacctgcaagaacaagtgaaggcgctcgaagagagtcgggcaagatgtagatgctctagtgcggcggccgcggctgccgccgcagccgctgctagttacccatacgatgttcctgactatgcgggctatccctatgacgtcccggactatgcaggatcctatccatatgacgttccggattacgcttctagatacccatacgatgttcctgactatgcgggctatccctatgacgtcccggactatgcaggatcctatccatatgacgttccagattacgctactagttacccatacgatgttcctgactatgcgggctatccctatgacgtcccggactatgcaggatcctatccatatgacgttccagattacgcttctagatacccatacgatgttcctgactatgcgggctatccctatgacgtcccggactatgcaggatcctatccatatgacgttccagattacgctactagacaggcctcgtaccagatcctctag

SEQ ID NO: 770 - DNA, 2347 bp, Artificial Sequence
  Artificial sequence
  P25128
tgcatgcacttttctaatcaattgtaactacactagatattgacctgaatatagttcaatgaaactgaaactgttattttaaaaccatatatagattaatcaatgcatactaagatttcaagaaaaagggactaaatgtgctgaaaaaagctaaaaccaaaaagactttttgaagacattttttttataaacaataagaaagtgagaaagattctaaattggtggcttactatttctaggaagaggatcttcacgcctaagttccacgtgagattgtgcttcttctgttgtattccacctcgattctcacattctcaaaccttatcttatatttatgggtattgttttctttgttccaaagtaacgagtactttcttgacaccaaaatgtttccttacaaacaaaatatagaaaacgattagaatttatatttagcttttgctctgcagtttctattctatgttaacaacccagatctaaaaatataaaagttgctaaattcattgctgatttaggattttaaaaatactatataacagcttcctgaattcattaattagtttgtgaaagaaatccaaaatttgtttttttcttgaggatatcaccaattttttaaaactgaagtacagatagattacaagcgtttgatatttttaagtataattaacgcccaaggcattaatcggtatcaaactattttgctgcataaatattttgttttttgatccactaacacaaactgttaaaaaaattaaaataattcattggttggaattgaatctcttactacactacaataacgtttagttaaaatgacgctcaaattactcatacaatatttttcttcttaattgggcaaccaattataaaattatttttcaattaatatgtgattaaaaaaattactcatgtagtcatattaatttgccgtgtaaaactcttgtttcatggattgtaactatggcccgactctgattatgtcccttaacatgaatataagcactttatcgatttgaattcggtttggtcatggccggccttccgcataagccacataagcggcagcttagggtcacatttttttcccctttgattttaaggtccacttttgatgaatcaagaagttacattgcactaccatgtcatatatattcacatttctgattttttctacacatatttatataagtatttatcttttttctattaaccagtttgtatttcatcgaatagcaagaaagttcaatactattcgactctcaagtgtttttccaaatcaaacacgcaaatacgacatattaattgaagtggataatgaaatttgaattcggatatgtattagtagttgttgttatgtacagtattttgtagattaaatagcacttggtctttaaactttaaacaagtactagtattatacaaaaacgtaagtacaatacgtgtcctatattttatgcggaggtacatacgtgtttaaacgtgaatagttggattaagtcgcttgaaaggttccctaaaatttggagccctagactgccatatcaacaacacctgtctgatcctccaactattttcatttcattttattcttctttttatatttttggattttatttatttttttataatttattaataaatattatagtttgtttttctttttaagttatccgtcatttcaatatacgtcatatcgacatatgtcctttttctcagccatttttattgctttataagtcaacagctttaattcccacaattatatatagtcgtcgttttattttattaaaagttctgaatcatttcaataattgctgattttaaaattcatttattaaaattaaaaataagataaagtccaaaaaacattaaaaaaaagctgctgatatttttctttgaaaaacgagaaaaatcatttaatagccacactgattggaagtataccaaatttacaaaaaataataatcacatcgaaaaaaaaaaaattgacatcaaaatatttttctcgaaaacaatatttatttttcactgttacataacattataaaaatgttaacgtggtccccacgtggcctacacgtgtcagcatcaagggttccactcgtaataagaagacaccataaagggtattttagtcaaatcacaaataaatcccaatctctacctgccctctgttgtttcttcctctcctcttctctcttgcacataagtttctctcacgttctcttttttaattttaatttctcgccggaaacaatctcatctcccggcgaacgaaacttccggtgtggtactgcaaacggagaaaaaaataaccaaagaagagagaaactcaaaagctactaag

SEQ ID NO: 771 - DNA, 2347 bp, Artificial Sequence
  Artificial sequence
  P25129
tgcatgcacttttctaatcaattgtaactacactagatattgacctgaatatagttcaatgaaactgaaactgttattttaaaaccatatatagattaatcaatgcatactaagatttcaagaaaaagggactaaatgtgctgaaaaaagctaaaaccaaaaagactttttgaagacattttttttataaacaataagaaagtgagaaagattctaaattggtggcttactatttctaggaagaggatcttcacgcctaagttccacgtgagattgtgcttcttctgttgtattccacctcgattctcacattctcaaaccttatcttatatttatgggtattgttttctttgttccaaagtaacgagtactttcttgacaccaaaatgtttccttacaaacaaaatatagaaaacgattagaatttatatttagcttttgctctgcagtttctattctatgttaacaacccagatctaaaaatataaaagttgctaaattcattgctgatttaggattttaaaaatactatataacagcttcctgaattcattaattagtttgtgaaagaaatccaaaatttgtttttttcttgaggatatcaccaattttttaaaactgaagtacagatagattacaagcgtttgatatttttaagtataattaacgcccaaggcattaatcggtatcaaactattttgctgcataaatattttgttttttgatccactaacacaaactgttaaaaaaattaaaataattcattggttggaattgaatctcttactacactacaataacgtttagttaaaatgacgctcaaattactcatacaatatttttcttcttaattgggcaaccaattataaaattatttttcaattaatatgtgattaaaaaaattactcatgtagtcatattaatttgccgtgtaaaactcttgtttcatggattgtaactatggcccgactctgattatgtcccttaacatgaatataagcactttatcgatttgaattcggtttggtcatggccggccttccgcataagccacataagcggcagcttagggtcacatttttttcccctttgattttaaggtccacttttgatgaatcaagaagttacattgcactaccatgtcatatatattcacatttctgattttttctacacatatttatataagtatttatcttttttctattaaccagtttgtatttcatcgaatagcaagaaagttcaatactattcgactctcaagtgtttttccaaatcaaacacgcaaatacgacatattaattgaagtggataatgaaatttgaattcggatatgtattagtagttgttgttatgtacagtattttgtagattaaatagcacttggtctttaaactttaaacaagtactagtattatacaaaaacgtaagtacaatacgtgtcctatattttatgcggaggtacatacgtgtttaaacgtgaatagttggattaagtcgcttgaaaggttccctaaaatttggagccctagactgccatatcaacaacacctgtctgatcctccaactattttcatttcattttattcttctttttatatttttggattttatttatttttttataatttattaataaatattatagtttgtttttctttttaagttatccgtcatttcaatatacgtcatatcgacatatgtcctttttctcagccatttttattgctttataagtcaacagctttaattcccacaattatatatagtcgtcgttttattttattaaaagttctgaatcatttcaataattgctgattttaaaattcatttattaaaattaaaaataagataaagtccaaaaaacattaaaaaaaagctgctgatatttttctttgaaaaacgagaaaaatcatttaatagccacactgattggaagtataccaaatttacaaaaaataataatcacatcgaaaaaaaaaaaattgacatcaaaatatttttctcgaaaacaatatttatttttcactgttacataacattataaaaatgttaacgtggtccccacgtggcctacacgtgtcagcatcaagggttccactcgtaataagaagacaccataaagggtattttagtcaaatcacaaataaatcccaatctctacctgccctctgttgtttcttcctctcctcttctctcttgcacataagtttctctcacgttctcttttttaattttaatttctcgccggaaacaatctcatctcccggcgaacgaaacgtccggtgtggtactgcaaacggagaaaaaaataaccaaagaagagagaaactcaaaagctactaag

SEQ ID NO: 772 - DNA, 479 bp, Artificial Sequence
  Artificial sequence
  P21460
ggtccgatccgtaacagtagtagctagttaatttgattattgtccgtccgcggccggtcagtggtcgcaatcgatcgatcgatatcatggacggcgacggcggcggcggatgggacgatcagggcaacggcggcggcgagacgaccaagtaccgtggcgtgcgtcgccggccttctggcaagttcgcggcggagatccgtgactccagcaggcagagcgtccgcgtctggctgggaaccttcgacaccgccgaggaggctgcgcgggcttacgaccgcgccgcctacgccatgcgcggccacctcgccgtcctcaacttccctgctgaggcgcgcaactacgtgcggggatcaggctcgtcgtcctcgtcccgacagcatcagcagcggcaggtgatcgagctggagtgcctagacgaccaagtgctgcaagagatgctcaagggtggcgacgatcagtacaggtcagcagctgggagc

SEQ ID NO: 773 - DNA, 514 bp, Artificial Sequence; identical to SEQ ID NO: 233
  Artificial sequence
  P21461

SEQ ID NO: 774 - DNA, 514 bp, Artificial Sequence; identical to SEQ ID NO: 233
  Artificial sequence
  P25098

SEQ ID NO: 775 - DNA, 544 bp, Artificial Sequence
  Artificial sequence
  P23523
tcgaccactcatcatatatcaaagcaagcagagctagctctagctagcttaatccatcttcgtcttcctctcgatcgatcgatcgatcgctgccatggaggacaaccggagcaaggacacggcgaccaagtaccgcggcgtgaggaggcggccgtggggcaagttcgcggcggagatccgcgacccggagcgcggcggggcgcgcgtctggctcggcaccttcgacaccgccgaggaggcggcgcgtgcctacgaccgcgcggcctacgcccagcgcggcgccgccgccgtgctcaacttcccggccgccgccgccgccggcaggggtggaggagccggcggcgccgcttccgggtcgtcgtcgtcgtcgtccgcgcagcgcggcaggggcgacaagatcgagttcgagtacctcgacgacaaggtgctcgacgatctcctcgacgacgagaagtaccgtggtaaatgatcaagatcatgatcagagctaggcatcttgttcttgcatgcatgcacaagaacaaatgacctaattaaacaacgc

SEQ ID NO: 776 - DNA, 932 bp, Artificial Sequence
  Artificial sequence
  P21266
acgagcggcacgcgcgggtgtggctcgggacgttccccgacgaggaggcggcggcgcgggcctacgacgtggcggcgctccggtaccgggggcgcgacgcggccaccaacttccccggggccgcggcgtcggccgccgagctcgcgttcctcgccgcgcactccaaggccgagatcgtcgacatgctccggaagcacacctacgccgacgagctccgccaggggctccgccgcggccgcggcatgggcgcccgcgcccagcccacgccgtcgtgggcgcgcgagccgctgttcgagaaggccgtgacgcccagcgacgtcggcaagctcaaccgcctcgtggtgcccaagcagcacgccgagaagcacttcccgctccgccgcgcggcgagctccgactccgcctccgccgccgccaccggcaagggcgtgctcctcaacttcgaggacggcgaggggaaggtgtggcgattccggtactcgtactggaacagcagccagagctacgtgctgaccaaggggtggagccgattcgtgagggagaagggcctccgcgccggcgacaccatagtcttctcccgctcggcgtacggccccgacaagctgctcttcatcgactgcaagaagaacaacgcggcggcggcgaccaccacctgcgccggcgacgagaggccaaccacaagcggcgccgaaccacgcgtcgtgaggctcttcggcgtcgacatcgccggcggcgattgccggaagcgggagagggcggtggagatggggcaagaggtcttcctactgaagaggcaatgcgtggttcatcagcgtactcctgccctaggtgccctgctgttatagcatcaaatcaaattcatatatagatcaaatcaaatcttcttctcttccatcttttttgttgttcatcgtctgttgtttcatcttcga

SEQ ID NO: 777 - DNA, 1291 bp, Artificial Sequence; identical to SEQ ID NO: 109
  Artificial sequence
  P21327

SEQ ID NO: 778 - DNA, 1068 bp, Artificial Sequence; identical to SEQ ID NO: 103
  Artificial sequence
  P21260

SEQ ID NO: 779 - DNA, 1348 bp, Artificial Sequence; identical to SEQ ID NO: 111
  Artificial sequence
  P21375

SEQ ID NO: 780 - DNA, 1349 bp, Artificial Sequence
  Artificial sequence
  P21258
tctcaggaggcttcacctttcctcagcttagctagctagctgctcgatccggcggcgtgatcgatcgatctctctgattctatcaggtgttcgaccagattccatcgatggacagcacgagctgtctcttggacgacgcgagcagcggcgcgtccacgggcaagaaggcggcggcggcggcggcgtcgaaggcgctgcagcgcgtgggcagcggcgccagcgcggtgatggacgcggccgagcctggcgccgaggcggactcgggcggcgagcggcgcggcggcggcggcgggaagctgccgtcgtccaagtacaagggcgtggtgccgcaaccgaacgggcggtggggcgcgcagatatacgagcggcaccagcgggtgtggctcggcacgttcaccggcgaggcggaggcggcgcgcgcctacgacgtggcggcgcagcggttccgcggccgcgacgccgtcaccaacttccgcccgctcgccgagtccgacccggaggccgccgtcgagctccgcttcctcgcgtcccgctccaaggccgaggtcgtcgacatgctccgcaagcacacctacctcgaggagctcacgcagaacaagcgcgccttcgccgccatctccccgccgccccccaagcaccccgcctcctctccgacgtcctcctccgccgcgcgcgagcacctgttcgacaagacggtgacgcccagcgacgtcgggaagctgaaccggctggtgatccccaagcagcacgccgagaagcacttcccgctccagctcccccccccctaccacaacctcctccgtcgccgccgccgccgacgccgccgccggcggcggcgattgcaagggcgtcctcctcaacttcgaggacgccgccgggaaggtgtggaaattccggtactcctactggaacagcagccagagctacgtgctcaccaaggggtggagccgcttcgtcaaggagaaggggctccacgccggcgacgccgtcggcttctaccgcgccgccggtaagaacgcgcagctcttcatcgactgcaaggtccgggcaaaacccaccaccgccgccgccgccgccgccttcctcagcgcggtggccgccgccgccgcgccgccacccgccgtgaaggctatcaggctgttcggtgtcgacctgctcacggcggcggcgccggagctgcaggacgccggcggcgccgccatgaccaagagcaagagagccatggacgccatggctgagtcacaagcacacgtggtttttaagaagcaatgcatagagcttgcgctaacctagctagcacgctgatgcagctagcgttttttttgctcattcgcttgcttgcttaatta

SEQ ID NO: 781 - DNA, 1338 bp, Artificial Sequence; identical to SEQ ID NO: 93
  Artificial sequence
  P21257

SEQ ID NO: 782 - DNA, 1076 bp, Artificial Sequence
  Artificial sequence
  P21255
gctctaaactaccataaaatcttaactcggcattttttttttcacgctaatggaaagtagcggtggaagccagctgggaaagaattccaaaacaagtgatggtcgtgaaacaaaaggttagttgtatctttgttttcttgttcttccttttagccacttcatccttgcttctcttaattacggctattcatttcgtagcattatgtccaaaaggggaaaatgaagatgccagaaaaggtgtatatcattttactagtgtcattttgttaatgtttactgatatttaacctgcctattgtcacacgggtatttttaccatccttgagaaggtacctagaggtaccgtattttctagtgtaaaatttggtacctctaggtactaggtatctcaaggtatcaaaaattttaatgtaaaatttaggtatttgaatgtactttctaaaaaactgtaaaataccttactgtcaccctttgcatcttgatgctttttttggttatgtcaatggagagaacaaaaggaaacgagaagtcagaaagaaacaaggaatttgcaatttgaaaaattctagtggacatacaaattgtaatataaaccataaaattgtaacttgaaacatatttcaagatggtttggctactgggctattttgcttactctggtcaccatattttttgtaaattcgcagaagttaatagcactgcgcaaaattttgttcatttcacagaagaagaggaagatattgttttcagaatgcacaggcttgtcgggaacaggtatcctaatacacatacctgtaatgtgcatcaagtgaaaatgaagacacagtgtctttttaatcgatctagcttatactatgattatttcatagtatgaaagtttatgaaatccataagtcagcctgttccaggcaaatacattatttgcagttccctaactttgctccttctatgatgtttaggtgggaacttatagctggaagaataccgggaaggacagcagaagaagtagagaagttctgggcaattaaacatcaagccacatgatagcagaaagaggatgtttgccccaaaagtag

SEQ ID NO: 783 - DNA, 356 bp, Artificial Sequence; identical to SEQ ID NO: 65
  Artificial sequence
  P21254

SEQ ID NO: 784 - DNA, 321 bp, Artificial Sequence
  Artificial sequence
  P21256
caagatctcaactcggcatttcattggagtttttcacgcctaatggatagcagcagtggtagccagggaaagaattccaaaaccagtgatggttgtgaaacaaaagaagttaataacactgcacagaattttgttcatttcacggaagaagaggaagatctcgttttcagaatgcacaggcttgttgggaacaggtgggaacttatagctggaagaatccctggaagaacagcaaaagaggtagaaatgttctgggcagtaaagcaccagaatacataaggggggaaaaagggtgtatgccctaaaagtagcgtacaattt

SEQ ID NO: 785 - DNA, 516 bp, Artificial Sequence
  Artificial sequence
  P21248
agggagcaggacaggttcctccccatcgccaacatcagccgcatcatgaagaaggccatcccggccaacgggaagatcgccaaggacgccaaggagaccgtgcaggagtgcgtctccgagttcatctccttcatcaccagcgagtgagtcgtcgccctcgtcctcccccctcttgtgctctgctctgctctgctctgtcttcttttgagttttgagctttgagctcgttgtttgacttgtcgttggcggcgatgagatgtgactgggtttttgttgtggtggggcaacattacagggcgagcgataaatgccagagggagaagcgcaagaccatcaacggcgacgacttgctgtgggcgatggccacgctgggcttcgaggactacatcgagcccctcaaggtctacctgcagaagtacagagaggtgcgtactgatgtggatgtttggaattggggtgattctctgttgatttaaaaaggtttagttattgctttgcgagttaggtagggacatc

SEQ ID NO: 786 - DNA, 488 bp, Artificial Sequence
  Artificial sequence
  P23384
tcgacggaggtgggatggcggatgggccggggagcccggggggaggaggggggagccaacatcagccgcatcatgaagaaggccatcccggccaacgggaagatcgccaaggacgccaaggagaccgtgcaggagtgcgtctccgagttcatctccttcatcaccagcgaggcgagcgataaatgccagagggagaagcgcaagaccatcaacggcgacgacttgctgtgggcgatggccacgctgggcttcgaggactacatcgagcccctcaaggtctacctgcagaagtacagagagatggagggtgatagtaaattaactgcaaaggctggtgatggctctgtgaaaaaggatgtacttggttctcatggaggaagcagttcaagtgcccaagggatgggccaacaagcagcatacaatcaaggaatgggttatatgcaacctcagtaccataatggggatgtctcaaactgaagataggacct

SEQ ID NO: 787 - DNA, 517 bp, Artificial Sequence
  Artificial sequence
  P23481
tcgacggaggtgggatggcggatgggccggggagcccgggggggggtgggggggtgagggagcaggacaggttcctccccatcgccaacatcagccgcatcatgaagaaggccatcccggccaacgggaagatcgccaaggacgccaaggagaccgtgcaggagtgcgtctccgagttcatctccttcatcaccagcgaggcgagcgataaatgccagagggagaagcgcaagaccatcaacggcgacgacttgctgtgggcgatggccacgctgggcttcgaggactacatcgagcccctcaaggtctacctgcagaagtacagagagatggagggtgatagtaaattaactgcaaaggctggtgatggctctgtgaaaaaggatgtacttggttctcatggaggaagcagttcaagtgcccaagggatgggccaacaagcagcatacaatcaaggaatgggttatatgcaacctcagtaccataatggggatgtctcaaactgaagataggacct

SEQ ID NO: 788 - DNA, 610 bp, Artificial Sequence; identical to SEQ ID NO: 37
  Artificial sequence
  P21253

SEQ ID NO: 789 - DNA, 468 bp, Artificial Sequence
  Artificial sequence
  P23304
tcgacaaaaactaagcgatgtcggaggggttcgacgggacggagaacggcggcggcggcggcggaggcggagtagggaaggagcaggaccggttcctgccgatcgccaacatcggccgcatcatgcgccgggccgtgccggagaacggcaagatcgccaaggactccaaggagtccgtccaggagtgcgtctccgagttcatcagcttcatcaccagcgaagcaagcgacaagtgcctcaaggagaagcgcaagaccatcaatggggacgacctgatctggtcaatgggcacgctcggattcgaggactatgtcgagcctctcaagctctacctcaggctctaccgggagacggagggtgacacaaagggttcaagagcttctgaactgccagtaaagaaagatgttgtacttaatggagatcctggatcatcgtttgaaggcatgtaggacgaggagtgtgatagct

SEQ ID NO: 790 - DNA, 720 bp, Artificial Sequence; identical to SEQ ID NO: 35
  Artificial sequence
  P21265

SEQ ID NO: 791 - DNA, 761 bp, Artificial Sequence; identical to SEQ ID NO: 39
  Artificial sequence
  P21252

SEQ ID NO: 792 - DNA, 1157 bp, Artificial Sequence
  Artificial sequence
  P21269
ggtgaggagcgagttgtagaggaggagggacaccgatcaaccgggaagctggcggccgggaagtggtgggagcggccagatgacacggccatggccgggatggaccctggcgggggcggcgccggcgccggcagctcacggtacttccaccatctgctccgaccgcagcagccgtcgccgctgtcaccgctgtcgccgacatcccatgtcaagatggagcactccaagatgtcacccgacaagagccccgtgggcgagggagatcacgcgggagggagtggaagcggcggcgtcggcggtgaccaccagccgtcgtcgtcggccatggtgcccgtcgagggtggcagcggcagcgccggcggtagtggctcgggtgggccgacgcggcgcccgcgcgggcgcccgcccgggtccaagaacaagccgaagccgcccatcatcgtgacgcgcgacagcccgaacgcgctgcactcgcacgtgctcgaggtcgccggcggcgccgacgtcgtcgactgcgtggccgagtacgcccgccgccgagggcgcggcgtgtgcgtgctgagcggcggcggcgccgtcgtcaacgtggcgctgcggcagccgggcgcgtcgccgccgggcagcatggtggccacgctgcggggccggttcgagatcctatctctcacgggcacggtcctgcagcctcccgcgccacccggcgcgagcggcctcaccgtgttcctctccggcggccagggccaggtgatcggcggcagcgtggtgggcccgctggtcgccgcggggcccgtcgtcctgatggcggcctcattcgcgaacgccgtgtacgagcggctgccgctggagggcgaggaagaggaggtcgccgcgcccgccgccggaggcgaagcacaagatcaagtggcacaatcagctggacccccagggcagcaaccggcggcgtcacagtcctccggcgtgacaggaggcgacggcaccggcggcgccggtggcatgtcgctctacaacctcgccgggaatgtgggaggctatcagctccccggagacaacttcggaggttggagcggcgccggcgccggcggagtcaggccaccgttctgacccatgtcttagcatccagttcaaaaattctccaaattaagaattgcgcagtgcag

SEQ ID NO: 793 - DNA, 1160 bp, Artificial Sequence; identical to SEQ ID NO: 117
  Artificial sequence
  P21465

SEQ ID NO: 794 - DNA, 1143 bp, Artificial Sequence; identical to SEQ ID NO: 123
  Artificial sequence
  P21244

SEQ ID NO: 795 - DNA, 1003 bp, Artificial Sequence; identical to SEQ ID NO: 135
  Artificial sequence
  P21264

SEQ ID NO: 796 - DNA, 1031 bp, Artificial Sequence
  Artificial sequence
  P21238
tacatgagctagtggagaagcatggcaggtctcgacctcggcaccgccgcgacgcgctacgtccaccagctccaccacctccaccccgacctccagctgcagcacagctacgccaagcagcacgagccgtccgacgacgaccccaacggcagcggcggcggcggcaacagcaacggcgggccgtacggggaccatgacggcgggtcctcgtcgtcaggtcctgccaccgacggcgcggtcggcgggcccggcgacgtggtggcgcgccggccgcgggggcgcccgcctggctccaagaacaagccgaagccgccggtgatcatcacgcgggagagcgccaacacgctgcgcgcccacatcctggaggtcgggagcggctgcgacgtgttcgagtgcgtctccacgtacgcgcgccggcggcagcgcggcgtgtgcgtgctgagcggcagcggcgtggtcaccaacgtgacgctgcgtcagccgtcggcgcccgcgggcgccgtcgtgtcgctgcacgggaggttcgagatcctgtcgctctcgggctccttcctcccgccgccggctccccccggcgccaccagcctcaccatcttcctcgccgggggccagggacaggtcgtcggcggcaacgtcgtcggcgcgctctacgccgcgggcccggtcatcgtcatcgcggcgtccttcgccaacgtcgcctacgagcgcctcccactggaggaggaggaggcgccgccgccgcaggccggcctgcagatgcagcagcccggcggcggcgccgatgctggtggcatgggtggcgcgttcccgccggacccgtctgccgccggcctcccgttcttcaacctgccgctcaacaacatgcccggtggcggcggctcacagctccctcccggcgccgacggccatggctgggccggcgcacggccaccgttctgacatgcgcatacatgggtgtagctccggcgaaaggagaggagatgagaggagagatcacaagaagcaaaggaaaggacatcgcaagggttcat

SEQ ID NO: 797 - DNA, 987 bp, Artificial Sequence; identical to SEQ ID NO: 133
  Artificial sequence
  P21243

SEQ ID NO: 798 - DNA, 1064 bp, Artificial Sequence; identical to SEQ ID NO: 145
  Artificial sequence
  P21246

SEQ ID NO: 799 - DNA, 633 bp, Artificial Sequence
  Artificial sequence
  P21251
tgcattcaaagtggtaattaagaatcggatgatcattttgattgttcctcttcatttgttttggatgtcaggtggcaggaacatggatcaggtcaagaaggcggcagtgagatcggatggggtgggaggtagtgcgaccaacgccgagctgccgatggccaacctcgtacgcctgataaagaaggtgctcccagggaaagcgaagatcgggggagcagccaagggtctcacccatgattgcgcggtggagttcgtcgggttcgtcggcgacgaggcctccgagaaggccaaggcagagcaccgccgcaccgtagcgccggaagactacttgggctcattcggcgaccttggcttcgatcgctacgtcgaccccatggatgcctacatccatggttaccgtgagtttgagagggctggtgggaataggagggtggcgccgcctcctccggcggcagctacaccgctgacgcccggtggaccgacattcactgacgcagagctgcagtttctccggtcggtgatcccctccagaagtgatgatgaatatagcggctcatcaccagccataggcggctatggctatggatatggctatggaaaaaatatgtgaacaacttgatgcatgtgtgtgtg

SEQ ID NO: 800 - DNA, 959 bp, Artificial Sequence; identical to SEQ ID NO: 167
  Artificial sequence
  P21267

SEQ ID NO: 801 - DNA, 257 bp, Artificial Sequence; identical to SEQ ID NO: 67
  Artificial sequence
  P21324

SEQ ID NO: 802 - DNA, 1290 bp, Artificial Sequence; identical to SEQ ID NO: 101
  Artificial sequence
  P21318

SEQ ID NO: 803 - DNA, 534 bp, Artificial Sequence
  Artificial sequence
  P21466
tcgacaagggttgcggcggaggcgcccggtcgctggcgatggccgacgacggcgggagccacgagggcagcggcggcggcggaggcgtccgggagcaggaccggttcctgcccatcgccaacatcagccggatcatgaagaaggccgtcccggccaacggcaagatcgccaaggacgctaaggagaccctgcaggagtgcgtctccgagttcatatcattcgtgaccagcgaggccagcgacaaatgccagaaggagaaacgaaagacaatcaacggggacgatttgctctgggcgatggccactttaggattcgaggagtacgtcgagcctctcaagatttacctacaaaagtacaaagagatggagggtgatagcaagctgtctacaaaggctggcgagggctctgtaaagaaggatgcaattagtccccatggtggcaccagtagctcaagtaatcagttggttcagcatggagtctacaaccaagggatgggctatatgcagccacagtaccacaatggggaaacctagc

SEQ ID NO: 804 - DNA, 735 bp, Artificial Sequence; identical to SEQ ID NO: 29
  Artificial sequence
  P21314

SEQ ID NO: 805 - DNA, 803 bp, Artificial Sequence
  Artificial sequence
  P21381
tttgacttgaccggacagtgctgttcggtggctcggccgcgatgccggactccgacaacgagtccggcgggccgagcaacgcggagttctcgtcgccgcgggagcaggaccggttcctgccgatcgcgaacgtgagccggatcatgaagaaggcgctcccggccaacgccaagatctccaaggacgccaaggagacggtgcaggagtgcgtgtcggagttcatctccttcatcaccggcgaggcctccgacaagtgccagcgcgagaagcgcaagaccatcaacggcgacgacctactctgggccatgaccacgctcggcttcgaggactacgtcgagccgctcaagctctacctccacaagttccgcgagctcgagggcgagaaggcggccacgacgagcgcctcctccggcccgcagccgccgctgcacagggagacgacgccgtcgtcgtcaacgcacaatggcgcgggcgggcccgtcgggggatacggcatgtacggcggcgcgggcgggggaagcggtatgatcatgatgatgggacagcccatgtacggcggctccccgccggccgcgtcgtccgggtcgtacccgcaccaccagatggccatgggcggaaaaggtggcgcctatggctacggcggaggctcgtcgtcgtcgccgtcagggctcggcaggtaggacaggttgtgaccgtcgccgtccatgcttgcatggccatggccatggcatggctcccgccgccggcttcttgcttggtgtcggtaattagcgctggtggcctgcgctggttaagttaacctt

SEQ ID NO: 806 - DNA, 803 bp, Artificial Sequence; identical to SEQ ID NO: 33
  Artificial sequence
  P21315

SEQ ID NO: 807 - DNA, 268 bp, Artificial Sequence; identical to SEQ ID NO: 69
  Artificial sequence
  P21320

SEQ ID NO: 808 - DNA, 302 bp, Artificial Sequence; identical to SEQ ID NO: 83
  Artificial sequence
  P21352

SEQ ID NO: 809 - DNA, 257 bp, Artificial Sequence; identical to SEQ ID NO: 81
  Artificial sequence
  P21353

SEQ ID NO: 810 - DNA, 250 bp, Artificial Sequence; identical to SEQ ID NO: 85
  Artificial sequence
  P21354

SEQ ID NO: 811 - DNA, 264 bp, Artificial Sequence; identical to SEQ ID NO: 79
  Artificial sequence
  P21355

SEQ ID NO: 812 - DNA, 268 bp, Artificial Sequence; identical to SEQ ID NO: 77
  Artificial sequence
  P21356

SEQ ID NO: 813 - DNA, 285 bp, Artificial Sequence; identical to SEQ ID NO: 73
  Artificial sequence
  P21351

SEQ ID NO: 814 - DNA, 1253 bp, Artificial Sequence; identical to SEQ ID NO: 107
  Artificial sequence
  P21500

SEQ ID NO: 815 - DNA, 1081 bp, Artificial Sequence; identical to SEQ ID NO: 97
  Artificial sequence
  P21501

SEQ ID NO: 816 - DNA, 1141 bp, Artificial Sequence
  Artificial sequence
  P23348
caaagttagttcgttaaccgttacaaacacaaaatggatggaggcagtgtcacagacgaaaccaccacaaccagcaactctctttcggttccggcgaatctatctccgccgcctctcagccttgtcggcagcggcgcaaccgccgtcgtctaccccgacggttgttgcgtctccggcgaagccgaatcccggaaactcccgtcctcgaaatacaaaggcgtggtgccgcaaccgaacggtcgttggggagctcagatttacgagaagcaccagcgcgtgtggctcggcaccttcaacgaggaagacgaagccgccagagcctacgacatcgccgcgcatcgcttccgcggccgcgacgccgtcactaacttcaagcctctcgccggcgccgacgacgccgaagccgagttcctcagcacgcattccaagtccgagatcgtcgacatgctccgcaagcacacctacgacaacgagctccagcagagcacccgcggcggcaggcgccgccgggacgccgaaaccgcgtcgagcggcgcgttcgacgcgaaggcgcgtgagcagctgttcgagaaaaccgttacgcagagcgacgtcgggaagctgaaccgattagtgataccaaagcagcacgcggagaagcactttccgttaagcggatccggcggcggagccttgccgtgcatggcggcggctgcgggggcgaagggaatgttgctgaactttgaggacgttggagggaaagtgtggcggttccgttactcgtattggaacagtagccagagctacgtgcttaccaaaggatggagccggttcgttaaggagaagaatcttcgagctggtgacgcggttcagttcttcaagtcgaccggactggaccggcaactatatatagactgcaaggcgaggagtggtaaggttaacaataatgctgccggtttgtttattccggttggaccggttgttgagccggttcagatggtacggcttttcggggtcgaccttttgaaactacccgtacccggttcggatggtattggggttggctgtgacgggaagagaaaagagatggagctgtttgcatttgaatgtagcaagaagttaaaagtaattggagctttgtaacattacatagtttttgagt

SEQ ID NO: 817 - DNA, 1304 bp, Artificial Sequence
  Artificial sequence
  P21495
ctcttagaatccgtacggtctaatcaacacaacaaaatggatgcaattagttgcctggatgagagcaccaccaccgagtcactctccataagtcaggcgaagccttcttcgacgattatgtcgtccgagaaggcttctccttccccgccgccgccgaacaggctgtgccgcgtcggtagcggtgctagcgcagtcgtggattccgacggcggcggcgggggtggcagcaccgaggtggagtcgcggaagctcccctcgtccaagtataagggcgtcgtgccccagcccaacggccgctggggctcgcagatttacgagaagcaccagcgcgtgtggctgggaacgttcaacgaggaagacgaggcggcgcgtgcgtacgacgtcgccgtgcagcgattccgcggcaaggacgccgtcacaaacttcaagccgctctccggcaccgacgacgacgacggggaatcggagtttctcaactcgcattcgaaatccgagatcgtcgacatgctgcgtaagcatacgtacaatgacgagctggaacaaagcaagcgcagccgcggcttcgtacgtcggcgcggctccgccgccggcgccggaaacggaaactcaatctccggcgcgtgtgttatgaaggcgcgtgagcagctattccagaaggccgttacgccgagcgacgttgggaaactgaaccgtttggtgataccgaagcagcacgcggagaagcactttcctttacagagcgctgctaacggcgttagcgcgacggcgacggcggcgaagggcgttttgttgaacttcgaagacgttggagggaaagtgtggcggtttcgttactcgtattggaacagtagccagagttacgtcttgaccaaaggttggagccggttcgttaaggagaagaatctgaaagccggtgacacggtttgttttcaacggtccactggaccggacaggcagctttacatcgattggaagacgaggaatgttgttaacgaggtcgcgttgttcggaccggttgtcgaaccgatccagatggttcggctctttggtgttaacattttgaaactacccggttcagattctatcgccaataacaataatgcaagtgggtgctgcaatggcaagagaagagaaatggaactcttttcattagagtgtagcaagaaacctaagattattggtgctttgtagcgttacgttactttttttgagttttttttttttttttgagttttgtgactgatgaaagaaagaaggtacaagaagaacggcggtgtagtggcatagtggcatcgcaagttggc

SEQ ID NO: 818 - DNA, 862 bp, Artificial Sequence
  Artificial sequence
  P21328
aacttcaacttttgttatggccaaccggtggtggaccgggtcggtgggtctagagaactctggccactcgatgaaaaaaccggatctggggttttccatgaacgagagtacggtgacggggaaccatataggagaagaagatgaggacagagaaaacagcgacgagccaagagagggagctattgacgtcgccaccacgcgccgccctaggggacgtccaccgggctccagaaacaagccgaaaccgccgatattcgtcacccgagacagccctaacgcgctgcggagccacgtcatggagattgccgtcggagccgacatcgccgactgcgtggcgcagttcgctcggaggcgccagcgcggggtttccattctcagcggcagcgggaccgtcgtcaacgtcaatctccggcaacccacggcacccggcgccgtcatggcgctccacggccgcttcgacatcctctccctcaccggctcctttctccctgggccgtcccctcccggcgccaccgggctcacaatctacctcgccggaggccaggggcagatcgtcggcggcggagtggtgggcccgctcgtggcggcgggccccgtattggtaatggcggctactttttccaatgctacgtatgaaagattgcctttagaggatgatgatcaggaacaacacggcggcggaggcggaggaggttcgccgcaggaaaaaaccgggggtcccggcgaggcgtcgtcgtcgatttcggtttataacaataatgttcctccgagtttaggtcttccgaatgggcaacatctgaaccatgaagcttattcttctccttggggtcattctcctcatgccagacctcctttctaatta

SEQ ID NO: 819 - DNA, 869 bp, Artificial Sequence; identical to SEQ ID NO: 131
  Artificial sequence
  P21467

SEQ ID NO: 820 - DNA, 826 bp, Artificial Sequence
  Artificial sequence
  P21330
gtgtatggccggcatagacttgggttcagcatcacattttgttcatcatcgccttcaacgccctgaccttgaagacgatgagaaccaacaagaccaagacaacaaccttaacgatcacgaagggcttgacctaattacaccaaatccaggtcctggtgatgttgttggtcgcaggccaagaggaagacccccaggttcaaagaacaagccaaaaccaccagttatcatcacaagagagagtgcaaacacccttagggctcacatccttgaagttagtactggttgtgacgtctttgaatcggtcgctacctatgcaaggaagcggcaaagagggatatgtgtcctcagtgggagtggcaccgtgaccaacgtgacattgaggcagccggccgcggctggtgccgtcgtcacgctgcacggaaggtttgagatcctctctttgtcaggatcattcctcccacctccagctccaccaggtgctacaagtttgactgtgttccttggtggaggacagggtcaagtggtgggaggaaatgttgttggtcctttggtggcttctgggcctgttattgttattgcttcatcttttactaatgtagcatatgagaggttgcctttggatgaagatgaatctatgcagatgcaacaagggcaatcatcagctggtgatggtagcggtgaccatggtggtggagttagtaataactcttttccggatccgtcttccgggcttccattcttcaatttgccactaaacatgcctcagttacctgttgatggttgggctggcaactctggtggaaggcaatcttactgatccagagtc

SEQ ID NO: 821 - DNA, 902 bp, Artificial Sequence
  Artificial sequence
  P21331
tggatgtgtctatggctggtttggatttaggaagcgcctcacgctttgttcaaaaccttcacagaccagacttgcacttgcaacaaaatttccagcagcaccaggaccagcagcaccagcgtgatttggaggagcagaaaactcctccgaatcacagaatgggggcgccgttcgacgatgatagcgatgatagaagcccgggcctggagctcacttcaggtcctggcgacatcgtcggacggcgcccgcgtggcaggcctcctgggtcgaagaacaagcctaagccgcccgtcataatcacccgggagagcgccaacacgctgagggcgcacatcctcgaggtcggaagcggctccgacgtcttcgactgtgtcaccgcgtatgcccggcggcgccagcgtgggatctgcgtcctcagtggcagcggcaccgtcaccaatgtcagtctccggcagcctgcagctgccggtgccgtcgtcacgctgcacggcaggttcgagattctctccctctctggctcgttcctcccgccgccggctccgccgggagccaccagcctcacaatctacctggccggcgggcaggggcaggttgtcggaggaaacgtcatcggagaattaaccgcagcagggccagtaatcgtcatcgcagcgtcgttcaccaacgtggcttacgagaggttacccttagaagaagatgaacaacagcagcaacaacagcagcttcagattcagccacctgcaacgacgtcgtctcaaggaaacaacaacaacaataaccctttccccgacccttcttcaggacttcccttcttcaatttaccactcaatatgcagaatgttcagttaccagttgagggttgggctgtaaaccctgcttcacgtccacaacctttttgagag

SEQ ID NO: 822 - DNA, 859 bp, Artificial Sequence
  Artificial sequence
  P21332
tatggctggtttggatttaggaagcgcgtcacgctttgttcagaatcttcacttaccggacttgcacttgcaacaaaattaccagcaaccccggcacaagcgcgattcggaggagcaagagactcctccgaacccgggaacagcgctggcgccgttcgacaacgatgatgacaaaagccagggcctggagctggcttcaggccctggggacatcgttggacggcgcccacgcggcagaccttccgggtccaagaacaagccgaagccaccggtgataatcacccgggagagcgccaacacgctgagggcgcacattctcgaggtaggaagcggctccgacgtcttcgactgtgtcaccgcttatgcgcggcggcgccagcgcgggatctgcgtcctcagcggcagtggtaccgtcaccaatgtcagtctccggcagcctgcggctgccggagccgtcgtcaggctgcacggaaggttcgagattctctctctctccggctcgttcctcccgccgccggctccgccgggagccaccagtctcacaatctacctcgccggcgggcagggccaggtcgtcggaggaaacgtcgtgggagaattaaccgcggcagggccagtaatcgtcatcgcagcatcgttcaccaacgtggcttacgagaggctccccttagaagaagatgaacaacaacaacaacagcttcagattcagtcacccgcaacgacgtcatctcaaggaaacaacaacaataaccctttccctgacccttcttcaggacttcccttcttcaacttaccactcaatatgcagaatgttcagttaccacctttttgagggttcatgaatctgataatatgagac

SEQ ID NO: 823 - DNA, 555 bp, Artificial Sequence; identical to SEQ ID NO: 3
  Artificial sequence
  P21341

SEQ ID NO: 824 - DNA, 568 bp, Artificial Sequence
  Artificial sequence
  P21471
tcgacttgtagggtttgtgagatgtcggatgcaccggcgagtccgagtcacgagagtggtggcgagcagagccctcgcggctcgttgtccggcgcggctagagagcaggaccggtaccttcccattgccaacatcagccgcatcatgaagaaggctctgcctcccaatggcaagattgcgaaggatgcaaaagacacaatgcaagaatgcgtttctgaattcatcagcttcattaccagcgaggcgagtgagaaatgccagaaggagaagagaaagacaatcaatggagacgatttactatgggccatggcaactttagggtttgaagactacattgagccgcttaaggtgtacctggctaggtacagagaggcggagggtgacactaaaggatctgctagaagtggtgatggatctgctagaccagatcaagttggccttgcaggtcaaaatgctcagcttgttcatcagggttcgctgaactatattggtttgcaggtgcaaccacaacatctggttatgccttcaatgcaaggccatgaatagtttagatgcttctacgcatcgc

SEQ ID NO: 825 - DNA, 556 bp, Artificial Sequence; identical to SEQ ID NO: 5
  Artificial sequence
  P21342

SEQ ID NO: 826 - DNA, 547 bp, Artificial Sequence; identical to SEQ ID NO: 31
  Artificial sequence
  P21348

SEQ ID NO: 827 - DNA, 553 bp, Artificial Sequence; identical to SEQ ID NO: 23
  Artificial sequence
  P21344

SEQ ID NO: 828 - DNA, 534 bp, Artificial Sequence
  Artificial sequence
  P21469
atggctgagtccgacaacgagtcaggaggtcacacggggaacgcgagcgggagcaacgagttgtccggttgcagggagcaagacaggttcctcccaatagcaaacgtgagcaggatcatgaagaaggcgttgccggcgaacgcgaagatatcgaaggaggcgaaggagacggtgcaggagtgcgtgtcggagttcatcagcttcataacaggagaggcttccgataagtgccagaaggagaagaggaagacgatcaacggcgacgatcttctctgggccatgactaccctgggcttcgaggactacgtggatcctctcaagatttacctgcacaagtatagggagatggagggggagaaaaccgctatgatgggaaggccacatgagagggatgagggttatggccatggccatggtcatgcaactcctatgatgacgatgatgatggggcatcagccccagcaccagcaccagcaccagcaccagggacacgtgtatggatctggatcagcatcttctgcaagaactagatag

SEQ ID NO: 829 - DNA, 600 bp, Artificial Sequence; identical to SEQ ID NO: 15
  Artificial sequence
  P21347

SEQ ID NO: 830 - DNA, 528 bp, Artificial Sequence; identical to SEQ ID NO: 19
  Artificial sequence
  P21345

SEQ ID NO: 831 - DNA, 602 bp, Artificial Sequence; identical to SEQ ID NO: 25
  Artificial sequence
  P21350

SEQ ID NO: 832 - DNA, 451 bp, Artificial Sequence
  Artificial sequence
  P21401
agcggttgcgtccgcatggaggacgacaagagtaaggaggggaaatcgtcgtcgtcgtaccgcggcgtgcggaagcggccgtggggcaagttcgcggcggagatccgcgacccggagcgcgggggagcccgcgtgtggctcggcacgttcgacaccgcggaggaggccgcgcgggcgtacgaccgcgccgcattcgccatgaagggcgccacggccatgctcaacttcccgggagatcatcatcacggcgccgcaagcaggatgaccagcaccggctcttcttcgtcctccttcaccacgcctcctccggcgaactcctccgcggcggcgggccgcggcggctccgatcggacgacggacaaggtggagctggagtgcctcgacgacaaggtcctggaggacctcctcgcggagaccaactatcgtgataagaactactagctagctagct

SEQ ID NO: 833 - DNA, 393 bp, Artificial Sequence
  Artificial sequence
  P21402
atggaggacgacaagaaggagggcaagtaccgcggcgtgcggaagcggccgtggggcaagttcgccgcggagatccgggacccggagcgcggcggctcccgcgtctggctcggcaccttcgacaccgccgaggaggccgccagggcctacgaccgcgccgcattcgccatgaagggcgccacggccgtgctcaacttccccgccagcggaggatcgtcagctggcgcggctcccggcggccggaccagcggcggctcctcctcgtccaccacgtcggctccggccagcagggggagggcccgtgttcccgactcggagaaggtggagctggagtgcctcgacgacagggtcttggaggagctgctcgcggaggacaagtacaacaagaactaa

SEQ ID NO: 834 - DNA, 444 bp, Artificial Sequence
  Artificial sequence
  P21403
acagccatcatcgccacccgcgcgcttatggatggcgagtggtccaaggacggcggaggcggcgagccgaccaagtaccgcggcgtgcggcgtcggccctggggcaagtacgcggcggagatccgcgactcgagccggcacggcgtccgcatctggctcggcacgttcgacaccgccgaggaggccgccagggcgtacgaccgctccgccaactccatgcgcggcgccaacgccgtgctcaacttcccggaggacgcgcccgcctacgccgccgccgcctcccgtggctccgccggcggatcctcgtccagaccggcgggctccggccgggacgtgatcgagtttgagtacctcgacgacgaggtgctgcaggagatgctcaggagccaggagccgtcggcggcggcggcgcagaagaagaagtagcgcgagcgccacaggtgg

SEQ ID NO: 835 - DNA, 604 bp, Artificial Sequence
  Artificial sequence
  P21404
gttaattctaagttctaagagaagaaaaatggagggtggaagatcatcagtttcaaatgggaatgttgaggttcgttatagagggattagaagaaggccatggggaaagtttgcagcagagattcgtgaccctacaaggaaaggaacaaggatatggcttggaacatttgacactgctgaacaagctgcacgagcttatgatgctgctgcttttcattttcgtggccacagagcaattctcaacttcccaaatgagtatcaatctcataatccaaactcttctttgcctatgcctctagctgtgtcagctcctccttcttattcttcttcttcttccacttctaattattccggtgatgataataataaccaccttgtgagaccagctttttctggagaaataatgcaaggtggtgatcatgatgatgatacttttgagttggagtacttcgataataagttgctcgaggaactccttcagatgcaagataacagacacttctaaaagtaaaatataacacaagccagctatgttgtgttagtcactggcatgaaataaaatgcaaagaaatattgttgattttatttaatatattttgtttga

SEQ ID NO: 836 - DNA, 486 bp, Artificial Sequence
  Artificial sequence
  P21405
tcgacattaagttctaagagaataacaatggagggtgggaagatcatctgcttcaaatgggaattgtgaggttcggtatagagggattagaagaaggccatggggcaagtttgcagcagagattcgtgaccctacgagaaaagggacaaggatatggcttggaacatttgacactgcggaacaagctgctcgagcttatgatgctgctgcttttcattttcgtggtcatagagcaattctcaacttcccaaatgagtaccaatctcataatccaaactcttctttgcctatgcctctaattgtgcctcctccttcttattcttcttctttcacttctaattattctggtgatgataataaccaccttgtgagacctggagaaataatgcaaggtggtgatcttgatgacacttttgagttggagtacttggataataagttgctcgaggaactccttcagatgcaagataacagacacttctaagc

SEQ ID NO: 837 - DNA, 576 bp, Artificial Sequence
  Artificial sequence
  P21406
gtagggatgacgcacaatcccactatccttcgcaagacccttcctctatataaggaagttcatttcatttggagaggacacgctgacaagctgactctagcagatctggtaccgtcgacaaggcacacaatggaagaggagtcaaaggagaaaaagaaggacactaaggaggaaccacgttatagaggagtgcggcggcggccgtgggggaagttcgcggccgagattcgggacccggcccggcacggtgcccgagtgtggctggggacatttctcacggcggaggaggctgctagggcttatgaccgagctgcctatgagatgaggggcgctttagccgttctcaattttccaaatgagtatccttcatgctcttctatgaactcatcttcaacattagcaccttcatcttcttcttcaaattcaatgcttaaaagtgatcatggtaaacaagttattgagttcgagtgcttggatgacaaattgttagaggaccttcttgattgtgatgactatgcctacgagaaagacttgcctaagaactgaacggtttgatcaagcggcgccttttccaaa

SEQ ID NO: 838 - DNA, 803 bp, Artificial Sequence; identical to SEQ ID NO: 141
  Artificial sequence
  P21493

SEQ ID NO: 839 - DNA, 631 bp, Artificial Sequence
  Artificial sequence
  P23465
tcgacgcgtccgcttcttctctcagaatacacaacacaaagtcaatataattatagtatatccctatgagtaggagttcggcgatgcatggaattacaagcacaaacaacaagttgaagggagttcggcgtcgaaaatggggcaaatgggtgtcggagattcgtgttccgggcacgcaagagcgtttgtggttgggaacctacgccacgccggaggctgccgcggtggctcacgacgttgccgtctactgtctaagtaggccttcttcgttggacaaacttaacttccccgaaaccttgtcttcgtacagtgttcagctcagggacatgtctccgaggtctgtgcagaaggtggcttccgatgttggcatggatgttgatgcaagaaacattgttgcgggcaaaacttcaacggtgggggcagaaactaattgcgagagtgatgagaggactagtactgcgtctgtgtgtaatgttgttggagaaggtggtgctgatcattcggatgtgttttggtgggatgatgatggtgggtcttggcatggaagtggtggagattctacggaaagggatgccttgagcatttccattgaagattatctttagctgttctaggtttcaactttagttgc

SEQ ID NO: 840 - DNA, 869 bp, Artificial Sequence
  Artificial sequence
  P23455
tcgacctcacgtaccggccagaaatatcacagcacacacacacggttaacttttttcccgcgcgaaatctctcgaagtgaaacatcccaagcaaaaatccgatcgattcggcgagctagcaggtcaactcgccatggctgacctcccatgcatatatatacgcgtagtacgtacacttgctttcccaacgctcgcgaatcaaatcgagggtgaaattaagtcaagaacggagagagatcacggtgaggttgatctcagctcgccggaggaggcaatgagccgggcggagtgcggcggcggcgaggaggaggagcggtgcaggtacaggggcgtgcggcggcggcggtgggggaagtgggtgtcggagatccgggtgcccggcacgcgggagcggctgtggctggggtcctacgccacgccggaggccgccgccgtcgcgcacgacacggccgtctacttcctccgcggaggcgcgggcgacggcggtggcggcggcgcgacgctcaacttcccggagcgcgcggcggccacgtacggcggcggcgccgccgtggcgcgcctgtcgccgcggtccgtgcagcgcgtggcgtccgacgccggcatggccgccgacgcgcagctcgtggcggcgcgggacgccgcgcccgcgcccgcgccggcgacggcgtacgcgcgcccggatcactgcgccggcgcgacgacggcgcggcacgacgagctggcgcgccgcgggatgtacggcgctcacgcgcatgccgccggcgcgaacgccaggacgagcggcgagcggcagctcgtctgtgccgaggagattagcgtggatgacatggagatcctgatgtaatcacgcagtgacaaaatagcaaagc

SEQ ID NO: 841 - DNA, 862 bp, Artificial Sequence
  Artificial sequence
  P25188
ctcacgtaccggccagaaatatcacagcacacacacacggttaacttttttcccgcgcgaaatctctcgaagtgaaacatcccaagcaaaaatccgatcgattcggcgagctagcaggtcaactcgccatggctgacctcccatgcatatatatacgcgtagtacgtacacttgctttcccaacgctcgcgaatcaaatcgagggtgaaattaagtcaagaacggagagagatcacggtgaggttgatctcagctcgccggaggaggcaatgagccgggcggagtgcggcggcggcgaggaggaggagcggtgcaggtacaggggcgtgcggcggcggcggtgggggaagtgggtgtcggagatccgggtgcccggcacgcgggagcggctgtggctggggtcctacgccacgccggaggccgccgccgtcgcgcacgacacggccgtctacttcctccgcggaggcgcgggcgacggcggtggcggcggcgcgacgctcaacttcccggagcgcgcggcggccacgtacggcggcggcgccgccgtggcgcgcctgtcgccgcggtccgtgcagcgcgtggcgtccgacgccggcatggccgccgacgcgcagctcgtggcggcgcgggacgccgcgcccgcgcccgcgccggcgacggcgtacgcgcgcccggatcactgcgccggcgcgacgacggcgcggcacgacgagctggcgcgccgcgggatgtacggcgctcacgcgcatgccgccggcgcgaacgccaggacgagcggcgagcggcagctcgtctgtgccgaggagattagcgtggatgacatggagatcctgatgtaatcacgcagtgacaaaatagcaaa

SEQ ID NO: 842 - DNA, 707 bp, Artificial Sequence
  Artificial sequence
  P23456
acgagctcgagctcagagtgatctcagatcgtcgtcgcggtcagcgccgacgacgagcaagcttcgccggagggggaagacggtacgtacatgggccgggtggcggcgagcggcggcggcggcggcggaggggagatgatgaggtacaggggcgtgcggcggcggcggtgggggaagtgggtgtcggagatccgggtgcccgggacgcgggagcgcctgtggctcggctcctacgccaccgccgaggccgccgccgtcgcgcacgacgccgccgtctgcctcctccggctcggcggcggccgccgcgccgccgcaggcggaggcggcgggctcaacttccccgcccgcgcgctcgccgcggcggcggccgcctcctcctacggcggcgccggcggtctcctgtccccgcgctccgtgcagcgcgtggcgtccgacgccggcatggccgccgacgcgcagctcgtggacctgcgccgcgaccacccgcccgccgccgccgccgcctcatcctccggcagcggcgtggcgggagacggtgcaagaaagcaagggacacgtggcgaggttagcgacacgtattggtgtaggaatggagaggatgggagcagaagccggagctccgggagtgaggagctcattgtttacgagggcttaagtgtagatgacatggaaattttgatgtaaacagtgattattttattaatatg

SEQ ID NO: 843 - DNA, 813 bp, Artificial Sequence; identical to SEQ ID NO: 179
  Artificial sequence
  P25402

SEQ ID NO: 844 - DNA, 783 bp, Artificial Sequence; identical to SEQ ID NO: 149
  Artificial sequence
  P23452

SEQ ID NO: 845 - DNA, 708 bp, Artificial Sequence
  Artificial sequence
  P23418
tcgactctgtaataataatgtacggacatggcgagataaccacggcagcagaatcagattacgctttgctggagtcaatacgacgtcacttgctaggtggagacaacgagttacgattcagtgagtcaataccgagttcatgtttcactcagagttggggagacttgccattgaaagagaacgactccgaggatatgttagtgtacagtgtcctcaacgacgccttcaacggagcctttgaaacgtcgtcgccgtcgtcggacttgagctgtctcagcgattttaacgattttccggcggttaaaatggaaacttcggagaacttagcagcggaggcggaaaaaatgaaggcggtggcggcgccgccgtcaaagggaaagcattacagaggggtgagacagaggccgtgggggaaattcgcggcggagatacgtgatccggcgaaaaaaggagcgagggaatggttagggacgtttgagacggcggaagatgcagctttggcttacgatagagctgcttttaggatgcgtggttcccgcgctttgttgaattttccgttgagggttaactccggtgaacctgacccggtaaggatcaagtcaaagaggtcttataagtcttcttcgtcgtcctcttctgaaaacgggaagccgaagcagaggagaagaacagagaacgtgccatagttcaggtgaagggcgatgttgt

SEQ ID NO: 846 - DNA, 844 bp, Artificial Sequence
  Artificial sequence
  P23419
tcgaccaggatgctgctgaacccggcgtcagaggcgtcggtgctagacaccatccggcagcacctcctcgaggagccagccgacgagagcttcgggagcctggtggcggaccagtggagcggctcgctcccgttccgcaccgacgacgccgacgacatggtggtgttcggggcgctgcaggacgccttcgcctacggctggctgcccgacggctcattcgtgcacgtgaagcccgagccggtgcggtcccccgactcgtcctcctacccctgctcctacgacggctcaccctgcttcggcctcctggacccggagccgccgctgacgcccggcaccaccacgcccagtagtagggggcaggaggaggccgcggcggccatggcccggggcaagcactacaggggggtgaggcagcgcccgtggggcaagttcgcggcggagatcagggaccccgccaggaacggcgcgcgcgtctggctcggcacgtacgacaccgccgaggacgccgcgctcgcctacgaccgcgccgcctaccgcatgcgcggctcgcgcgcgctcctcaacttcccgctccgcatcggctccggggacaagcgcccgtcgccggcgccgcccgagcccgccacctcctcggactcctcctcgtcttcggccagcggctcgcacaagaggcggaagcgaggcgaggccgcggctgccaacatggccatggcgctggtgcccccgccctcccagcttaaccggccggcccagccgtggttccctgccgcgccggtcgagcaggcggcgatggctccgcgcgtggagcagatcgtcgtctagtctagccatgcgccggagaaat

SEQ ID NO: 847 - DNA, 774 bp, Artificial Sequence; identical to SEQ ID NO: 265
  Artificial sequence
  P25159

SEQ ID NO: 848 - DNA, 1098 bp, Artificial Sequence; identical to SEQ ID NO: 277
  Artificial sequence
  P25163

SEQ ID NO: 849 - DNA, 821 bp, Artificial Sequence
  Artificial sequence
  P25166
ccggaccggaccggacagaggcatgtcctgatggaattcaggggccatgacgaacccgtcgacgagatgggagtcgcgtacggcaggacgccaccctcctcctcctcctcccccgccgcctccgcctccgcggggaacggcgccggcgcggcggaggtgaggtaccacgagtgcctgcgcaaccacgccgcggcgatgggcggccacgtcgtggacggatgcagggagttcatgccgatgccgggggacgccgccgacgccctcaagtgcgccgcctgcggctgccaccgcagcttccaccgcaaggacgacgggcagcagcagcagcagctgcgcctgctcatcccgtccccgcccacgccgcgcgtcccgctgctcatgccgccgccgcagccgcagccgcacccgcacccgcaacacccctacctgcacccgccgttcccgtaccaccacaccccaagcggcagcggcggcacgacgaccgagtcgtccagcgaggagcgggggcctccctcctcgtcggcggcggcggcgcaggggcggcggaagcggttccggaccaagttcacgccggagcagaaggagcagatgctggcgttcgcggagcgggtggggtggcggatgcagaagcaggacgaggcactcgtcgaacagttctgcgcgcaggtcggcgtgcggcgccaggtgttcaaggtgtggatgcacaacaacaagagcagcatcggcagcagcagcggcggcggcagtaggaggcagccgcaggagcaacagtcacaacagcagcagcagcagcagtagccatgggaggagacaagcatttg

SEQ ID NO: 850 - DNA, 743 bp, Artificial Sequence; identical to SEQ ID NO: 267
  Artificial sequence
  P25167

SEQ ID NO: 851 - DNA, 789 bp, Artificial Sequence
  Artificial sequence
  P25407
gcggcgcggatgggcgcgcacgtgctcgacggctgcggcgagttcatgtcgtcccctggcgacggcgccgcggcgctggcctgcgccgcgtgcggctgccaccgtagcttccaccgccgcgagccggcggtcgtcgcgccggcctcgctctcgctctgccccgcctccgcctccgcctccgccgccgccggcctggtgtccctatccccctccgcgacgcccaccggcgccaactcctcccggctcatgccgctcctcctcgccccgccgcacatgcagaagcgcccgcccgtcctccccgtgtccccggcgtctgcgcccgccgcgctggccgagtcgtcaagcgaggagctgcgcccgccgccgctcccctcttcccacccccacgcgcacgcggccgccgtggtggcggcgtcggcctccgcgccgccggggccgagcaagaagcgcttccggaccaagttcacggcggagcagaaggagcggatgcgtgaattcgcgcaccgcgtcgggtggcgcatccacaagcccgacgccgccgccgtcgacgcgttctgcgcccaggtcggcgtctcccgccgcgtcctcaaggtgtggatgcacaacaacaaacacctcgccaagacgcccccgtcgccgacatcgcagccgccgccgccgccgctccaccacgatccttctcctcctccccctcctcaccaccaccaccaccaccatcaccaccaccacccaccacaacaccatcagcagcagcagcagcagcatgatgcatgagagagtgagcgagta

SEQ ID NO: 852 - DNA, 803 bp, Artificial Sequence
  Artificial sequence
  P23421
tcgacggagaccaccggagatatgtacggacggagtgattcttacgaatccgatttggcgcttctggattcgattcgccgccacttgctgggagagtccgaattgatattcggagccccgaatttcggttcgggtcggagctccagtttcagcagcttggactcgtgtttgagtgatgattggggagagcttccgtttaaggaggacgattcagaagatatggtgttgtacggcgttctccgtgacgcagttaatgtggggtgggtcccatccctcgatgccggctcgcccgagagcgtctcgtcgggttttccggcggtgaagctggagcctgatgtcatgccggcgttgattaatccgtgtccgcctccggcgccggcggtggaggagaagaaggttgttccgccgaaggggaagcactaccgcggcgtgcggcagcggccgtggggaaagttcgcggcggagatccgggacccggcgaagaacggggctagggtttggctggggacgtttgagacggcggaggacgcggcgttggcgtacgaccgcgccgcctaccggatgcgagggtcgagggcgctgctgaattttccgttgagggttaactccggcgagccagatccggtgagggtgacgtcgaagcggtcgtcgtcgccggaaagtatggcggcggcggcgccgaagagaaagaaagttatggtggtggggacggtgcaagagcaagtggggagtcaagtggtggagtgtacacgtggcgaacagttattggttagctgagagagattctaaaattggtattgtgt

SEQ ID NO: 853 - DNA, 1018 bp, Artificial Sequence
  Artificial sequence
  P23423
tcgaccacgaaatgtacggacaaagtagctatgagtccgatttggcccttttggactccattcgccgccacttactcggcgactccgaggaacacagattcggagccccgaatgttaattcgggtagcactccattgtactctcggagctccagtttcggcaggttgtacccttgcctgagtaacgattggggcgaacttcctcttatggaagacgattcagaagacatgcttctttatggtgttcttcgcgacgccgtgaacgtaggctgggtcccatctctcgacgcttcctcaccggagagtttctcgtcggctttcatgccgccggtgaccgtgaaatccgaaacggatctatttccggcaccggaaccgatttgtaaccctccggtggttcagggcccggcgccggcggtagttccggcgaaagggaagcactaccggggcgtgcggcagcgaccgtggggaaaattcgcagcggagatccgcgacccggctaaaaatggggctcgggtttggcttgggacttttgagacggctgaggacgccgcgctggcttacgatcgagccgcgtatcgaatgcgcggctcgcgggctttgttgaattttccgctccggattaattcgggcgagcccgaaccggttcgagttacggcgaagcgggcttcagcagaaccgtgttcttcgtcggagagtggatcttgggtgaagaagcggaagaaggtggtgggttgagaacggggcacgtggagagcagttgttggtgaagtaatttgtgatgctaaaaaggggtggaataaatgggttggcatgctcactcattgctcaagtgggactgtgggactgatcaaatctaaagctaaaaaagaaaacaaaccacatttggaaaaactgattagggtcgaggttctgtttggctttgtgaatacagttacaagatttcttattttttggttcaattctataataatatctgtaacatagttgggtagggcacccaccctgtgctgaactaagtt

SEQ ID NO: 854 - DNA, 689 bp, Artificial Sequence; identical to SEQ ID NO: 211
  Artificial sequence
  P25204

SEQ ID NO: 855 - DNA, 666 bp, Artificial Sequence
  Artificial sequence
  P25205
atggcggcagtcggagcgcacccagtgctgtaccaccacccggcgccggcgggcgacgcctcctccatgtcctcctacttctcccacggaggcagctccaccacctccagctctgcgtccagcttcaccgccgcgctcgcgccgacgacgacggcgctcgccgagcatttcgacatctccgagttcctcttcgacgacgctgcgggcgctggggtcgccggcgcgccaggtgtgttcgccgatggcgcggcccgccccgtcgtcctgccggtgccggatgccgctggtggtggtgcaattatcggcgcagccgctgggggcgcggctgcggcgtcggaggtgccagagcggccgcggacgacgcggatcgcgttccggacgaggtcggagatcgagatcctggacgacggctacaagtggaggaagtacggcaagaagtccgtcaagaacagccccaacccaaggaactactaccggtgctcgacggaagggtgcaacgtgaagaagcgggtggagcgggacaaggacgaccccagctacgtggtgacgacgtacgaggggatgcacaaccacgtcagccccagtacggtgtactacgccagccaggacgccgcctccggccgcttcttcgtcgccggcacgcagccaccgggctccctcaactga

SEQ ID NO: 856 - DNA, 597 bp, Artificial Sequence
  Artificial sequence
  P25368
caatggcggcttccgtaggactgaaccctgaagctttcttcttcagcaactcctactcctactcctcatcccctttcatggccagctacacgccggagttctcggccgccgctatcgacgccaacttattctccggcgagctcgatttcgactgctctctcccagctccggcccaggagtacccggaaaatgaaaacactatgatgaggtacgagagcgaggagaagatgagggcgagggtgaacgggaggatcgggttcaggacgaggtcggaggtggagattcttgatgatggcttcaagtggaggaagtacggcaagaaagctgtcaagaacagcccaaatccaagaaactactaccggtgctcgacggaggggtgcaacgtgaagaagcgagtggagagagaccgggaggaccaccgctacgtcatcaccacctacgacggcgtccacaaccacgcgagccccgccgccgccgccgcggcgctgcagtacgccgccgccgccggcgactactacagcccgccgctcagcagcgccggctcgccgccggccgcctattcggcaggcggctcgctgctcttctgagggctgatga

SEQ ID NO: 857 - DNA, 680 bp, Artificial Sequence; identical to SEQ ID NO: 199
  Artificial sequence
  P25207

SEQ ID NO: 858 - DNA, 625 bp, Artificial Sequence; identical to SEQ ID NO: 205
  Artificial sequence
  P25208

SEQ ID NO: 859 - DNA, 662 bp, Artificial Sequence; identical to SEQ ID NO: 187
  Artificial sequence
  P25384

SEQ ID NO: 860 - DNA, 662 bp, Artificial Sequence; identical to SEQ ID NO: 187
  Artificial sequence
  P25222

SEQ ID NO: 861 - DNA, 831 bp, Artificial Sequence; identical to SEQ ID NO: 213
  Artificial sequence
  P25210

SEQ ID NO: 862 - DNA, 729 bp, Artificial Sequence; identical to SEQ ID NO: 201
  Artificial sequence
  P25211

SEQ ID NO: 863 - DNA, 663 bp, Artificial Sequence; identical to SEQ ID NO: 195
  Artificial sequence
  P25385

SEQ ID NO: 864 - DNA, 618 bp, Artificial Sequence
  Artificial sequence
  P25213
atggcgacttcgctgggactgaaccctgaagatctcttcacttcgtactcgtcttcctactactcctcgccgccgttcatgtccgactacgcggcgagcttcacgccggcggccggggactccacggccttctcctcggagctcgacgaccttcaccacttcgactactcaccggcgccgatcgtcactgctgccggagccggggctgggggcggcgatcgcaacgagaagatgatgtggtgtgagggtggtggtgacgagagaagactcagaagcaacggaaggatcgggttcagaacgaggtcagaggtggagatcttggacgacggattcaagtggaggaagtacgggaagaaggccgtcaagaacagcccaaatccaaggaactactaccgctgctcgtcggagggctgcggcgtgaagaagcgggtggagagggaccgcgacgacccccgctacgtcatcaccacctacgacggcgtccacaaccacgccagccccggagccgctgctatcatcgtcccgtacggcagcggcggcggcaatagcggcttctacagcccgccgcacagcggctccccgtcggccacctcctactcgggctccctagccttctga

SEQ ID NO: 865 - DNA, 744 bp, Artificial Sequence
  Artificial sequence
  P25214
gatgtcgtcgctgtacccgtctctcctctcgctgagcgagagccccgccgagtaccggcaggtcggcggtggccgctacgcgggggaggacgtcgtcgacgacgacgacgacatggctgccgtcgccgacgctgtgtccagctacctctccttcgacatggacgacgtcgagtattacacgccggaggtgggcttccactcaaagcagcacaacccgccgccagttgctgcggcgccactggaagccggaggaggcagggagcaaagccggcgggaagccgccgtcaatcttggcaagatggacaggggaccggcgccggtgagcggcggcgcggcgactggcggcgtgccgaggagcaagaacggcagcaagatcgcgttcaagacgaggtcggaggtggacgtgctggacgacggctaccggtggaggaagtacggcaagaagatggtcaagaacagccccaacccaaggaactactaccggtgctcgagcgaggggtgccgcgtgaagaagcgggtggagcgcgcccgggacgacgcgcgcttcgtcgtcaccacctacgacggcgtccacaaccacccggcgccgctgcacctcaggccgcagctgccgccgcccggcggctactcgatcgccggggcaccggccgtggtggcgccgcacggccgcctcgggctggaggaggccgaggtgatcgctctcttcaggggcaccaccgccacctcgctgctgcttccttgacc

SEQ ID NO: 866 - DNA, 731 bp, Artificial Sequence; identical to SEQ ID NO: 209
  Artificial sequence
  P25215

SEQ ID NO: 867 - DNA, 445 bp, Artificial Sequence
  Artificial sequence
  P25089
atacaagtagtagtgagcatggaggacgacaagaaggaggcggcgagcaagtaccgcggcgtacggaggcggccgtggggcaaattcgcggcggagatccgcgacccggagcgcggcggctcacgcgtctggcttggcacgttcgacaccgccgaggaggccgcgcgagcgtacgaccgcgccgcattcgccatgaagggcgctatggccgtgctcaacttcccaggcaggacgagcagcaccggctcttcgtcgtcatcgtcatccacgccgccagctccggtgacgacgagccgccactgcgccgacacgacggagaaggtggagcttgtgtaccttgacgacaaggtgctcgacgagctccttgcggaggactacagctaccgcaacaacaacaactactgatccggccgtcgatgaactgagacggatcgacatggggccg

SEQ ID NO: 868 - DNA, 484 bp, Artificial Sequence
  Artificial sequence
  P25090
gtcgccatcgctatggacggcgactggtccaaggacggcggaggtggagagccgaccaaatatcgcggcgtgcggcggcggccctggggcaagtacgcggccgagatccgcgactcgagccgccacggcgtccgcatctggctgggcaccttcgacaccgccgaggaggccgccagggcgtacgaccggagcgcctactccatgcgcggcgccaacgccgtcctcaacttcccggaggacgcgcacgcctacgccgccgcctgccgcggctccggatcctcctcatcctcgtccaggcataggcagcagcagcagcagggctccggcagggacgtgatcgagctcgagtacctcgacgacgaggtgctgcaggagatgctcaggaaccacgagccgtcgtcgtctgcgaggaagaagatgtaatgcaagacgactggtacacgtggcgaatgcacgttgcacatcagaatgccatgtatgcgtg

SEQ ID NO: 869 - DNA, 917 bp, Artificial Sequence
  Artificial sequence
  P25661
atggcctcgcatcagcagcagctcatgtaccagtcgcatcagcagcagcagcagatggcttccgccatggagggactctaccgcaccgtcagctccggcggcacggagtccaccgccgccgccgccggcaacagcctcctccggcagagcagctcccccgccggcttcctcaaccatcttaccatggacaacggatacgggaatatgctaagagcgggcatgggcggcggcggcggtggcggcgacccgcggctcaaggggcagctcagcttctcgtcgcggcaggggtcggtgatgtcccagatctcggagatgggcagcgaggacgaggagctcgccggcggcggcggcagcccggaggctggcagcaacggcggtggcgccgcacgcggcggctacggcggcgggtacgcgatggggtcctccgcctgggaggagccctcgccgccggcgacgtcgctcctcccggacagcagcctcccgtccaagcgcccccgcgacgacctgccgcggcagctcagcctcccggcggcgtccaagaacagcagcaagcccccctcctccgcctccgccgccgcgtcgccggagatggccgccatcgagaagttcctccagttccaggacgccgtcccctgcaagatccgcgccaagcgcggctgcgccacccacccccgcagcatcgccgagcgggtgaggaggacgcggatcagcgagcggatacggaagctgcaggagctcgtccccaacatggaaaagcaaaccaacactgctgacatgttggatcttgccgtggactacatcaaggagctccagaagcaggtcaaggtgttaaacgacagccgttccagctgcacctgctcggcgagcaagcagaagcacttcgccggctaaatcaatcaagtcaatcaatcgccatg

SEQ ID NO: 870 - DNA, 455 bp, Artificial Sequence
  Artificial sequence
  P25370
atgagctccgggtgggaggagtcgtcgctcatgtcggacacgaacatctccggcgtgaagcgccagcgcgactcgtcggagccgtcccagaacggcggcggcggcggcggcctggcgcaccagttcagcctgccgaagacctcgtcggagatggcggccatcgagaagttcctccagttccaggacgcggtgccctgcaagatccgcgccaagcgcggctgcgccacgcacccgcgcagcatcgccgagcgggtgaggaggacaaggatcagcgagcgaatcaggaagctgcaagaactcgtgccaaacatggacaagcaaaccaacactgctgacatgctggatttggctgttgactacatcaaggatcttcagaagcaggtcaagggattaaacgacagccgagctaactgcacctgctcagcgaagcatcagcagtactctggctagaaagc

SEQ ID NO: 871 - DNA, 1164 bp, Artificial Sequence; identical to SEQ ID NO: 309
  Artificial sequence
  P25230

SEQ ID NO: 872 - DNA, 885 bp, Artificial Sequence
  Artificial sequence
  P25233
atggccgggcagcagccgcagcagcagggcccaccggaggacgactttttcgaccagttcttctccctgaccagctccttccctggcgccgcgccgggcggccgcgccgccggtgaccagcccttctccctcgcgctcagcctcgacgccgccgcggcggccgaggcgtccgggagcgggaagaggctcggggtcggcgatgacgccgagggtggcggcagcaaggcggatcgggagaccgtgcagctcaccggactcttcccgccggtgttcggcggcggcggcgtgcagccgccgaacctccgccccaccccgcctacccaggtgttccacccgcagcagtcgaagcagggcggagcagccgtcgggccgcagccgccggcgccgaggccgaaggtgcgagcgcggcgtgggcaggcgaccgacccccacagcatcgcggagaggctaagaagagagagaatagcagaaaggatgagggccctacaggaattggtccccaatacaaacaagacagatagggcagctatgctagatgagatccttgattatgtgaaattcctgaggctgcaagtaaaggttttaagcatgagcaggctgggtggcgcgggtgctgttgcacagctggttgctgatattccactttcagttaagggggaagcaagcgatagtgggggcaaccaacagatttgggaaaagtggtcaacggatggcacagaaagacaggtagcgaagctgatggaagaagacatcggggcagcgatgcaatttctccaatccaaagcactctgcatgatgccaatctcgctcgccatggcaatctatgacacacaacaaacacaggatggacaaccagtgaagcacgaacccaacactccttcctag

SEQ ID NO: 873 - DNA, 583 bp, Artificial Sequence
  Artificial sequence
  P25426
actgagcttctcgtcacggcaggggtcattgatgtcccagatctcagagatggacagcgaggaggtcggagggagcagcccagaggcttccggcggcggcggcagggggtacatccctgggtacccaatgggctctgggtgggaggactcgtcggctctcttgtcagacaatttgtctggcgtcaaacgcccccgggactcgtcggagcctggccagagcggccttacgcaccagttcagcgtgcccaagacgtcgtccgagatggcaactattgagaaattcctccagttccaggacgccgtgccttgtaagatccgtgccaagcgggggtgcgccactcatccacgcagcatcgctgagagggtgaggagaacaaagatcagtgagcgaatccgaaagctgcaagaactcgttccaaatatggacaagcaaaccaacacatctgacatgctggatttggctgtcgactacatcaaggatctccagaagcaggttaaggtactaaaggagagccaagataactgcacctgctcagcaagcaagaaccagcagcactcctgctgaaaccgtaatgctcactgt

SEQ ID NO: 874 - DNA, 1007 bp, Artificial Sequence
  Artificial sequence
  P25360
atgcagcccactacgcgggaaatgcaggccatggccgccgccggccagcagatctccctcgacgacctccgcgcggcagcaggcggcgtgcacgacgacttcctggaccagatgctcggaggcctgccgccgtcggcatggccggagctgtcgtccgcggcgggagggaaggcgccggatggcggcgcgcaggcggagcagatgcagcaccagccgcagcacttgggtgggggtgggggcctgtacgacgactccgccttgctggcgtcgcggctccggcagcaccaaatcagcggcggcggcggcggggaggccgtgaagcagatggtgctgcagcagctggccgatctgaggcaggaacaccatgtgttgctgcagggcatgggccgctcgacctcgacgggcggcagcagagacggcggcctgctcctcccgctctctctcggcagtggcggatcgggcggcgacgtgcaggcgctactcaaagctgtagccgactccgccggaggagaagccgcaggcgtcttcggcggttccttcgccggatcgctccaccaccaccagcagcagcagcagcattttcaatcacatccgcagcagcaaacggcgccgttgccggggcagggcttcggtggaggcgcgggcgcgtccggcggcgtgtcgcagccgcaggccggcgctgcgtgcggaggcgccgccgcgccgcccaggcagcgggtacgggctcggcgcggccaggccaccgacccccacagcatcgcggagcggctccggagagagaggatcgcggagaggatgaaggcgcttcaggagctggtgcccaacgccaacaagacggacaaggcgtcgatgctggacgagatcgtcgactacgtcaagttccttcagctccaagtcaaggtgctgagcatgagccggctaggtggtgccgctgccgtcgcgccgctggtggccgacatgtcctcggagggtcgaggcggcgtggcggtcgcggccgggagcgatga

SEQ ID NO: 875 - DNA, 712 bp, Artificial Sequence
  Artificial sequence
  P25241
atgaaaggtgttggaaactatagtggggtcaatggcaatgatggtgaacttagtctatctatgaacagaatgaagaatcacattagcttctcatcaataagtccttcttcttccttgggaatgctatcaccaacctccaaaatgggcacggagggtattagggtaactagacctgaggatgggagacagggaagttgcaatggtgatgctcgatattatggtcctggattcccttatgcttcttggaatgagccctcacaccccaaaagacagcgaagtagtaatgatgagttactttttgattctcagaatggagagccaggaaatcaagttcaaaggctttcgcatcatttgagtttgccaagaacgtcgtcggagatgtttgctatggataatttgcttcagttctcagattctgttccttgtaaaatcagagcaaagagaggctttgctactcatcctcgaagcattgccgaaagggtgagaagaacaaggatcagtgaacgaataagaaaattgcaagagcttgttccaaccatggacaagcaaactagcacagcagagatgttggacttggctttagactacataaaagatcttcagaaacaattcaagactctgagcgataaacgggctaaatgcaaatgtataaacatgcagaagtcagaagcagatcgagttgcttgagtttcttttgtacagggctgccagg

SEQ ID NO: 876 - DNA, 380 bp, Artificial Sequence
  Artificial sequence
  P25242
taatatgttatcacatcacttgagtttaccaaaaacttcagcagagatgattactatggagaagttgcttcagttccctgattctgttccttgtaaaatcagagcaaagcgaggctgtgctactcatcctcgaagcattgctgaaagggtgagaagaactcggatcagtgaaagaatgaggaaattacaagagcttgtcccacacatggataagcaaaccaacacagcagacatgttggacttggctgttgaatacattaaagatcttcagaaacaattcaagactctaagtgaaaaaagggcaaactgcaagtgtataagcatgccaaaggcagatacaaatcaaattgcttgatcacctttctttatgagcaatgcat

SEQ ID NO: 877 - DNA, 666 bp, Artificial Sequence
  Artificial sequence
  P25243
atggggactttgggggctgttaataacagtatcgaagatgcaaaattttctagttcgagaaggttgaagaatcaaccgaactattcttcgtcggggagaatgtcgtccattgctgaaattggggacaaagggaatcgagaaagtagtccagacaatgaagcttttgctgatggtaacgattttatcaccggtttccaagttggtcattgggatgatgctgcaatcatgtctgacaacgttggtggtctcaaaagatttagagaaaacgattcaaaaccattttctggcttaaatgcggctgagactcagaatgaaacaggacagactcatgctcctttggcccatcagttgagtttgccaaatacttcagctgaaatagctgccattgagaagtttctgcagttttcagattctgttccgtgcaaaatccgtgccaaacggggctgtgccactcacccaagaagcattgcagagagggttagaagaactaaaattagtgagcgtatgaggaaacttcaagatcttgtcccaaacatggacaagcaaactaacacagctgatatgttggacttggctgtggattacatcaaagaccttcaaaagcaagttcagacgctttcagattgtcatgcaaagtgtacgtgttcacacgagaagcaacaataa

SEQ ID NO: 878 - DNA, 798 bp, Artificial Sequence
  Artificial sequence
  P25244
atggagcaaggatcgttttcaatgggactcaggcatagtggaaataattctaaccttaccaggcatagtagctctcccgcaggactattttcccaaattaacattgaaaatgtgtatgctggtgtgagaggcatggggagtttgggagctgttaacaacagtatcgaagatgcgaaattttctagttcgaggaggttgaagaatcaaccgaactattcttcgtcggggagaatgtcgtccattgctgaaattggggacaaagggtatagagaaagtagtccagacagtgaagcttttgctgatggtaacgattttatggccggtttccaagttggtcattgggatgatactgcaatgatgtctgacaacgttggtggtctcaaaagatttagtgaagaagattcaaaaccattttctggcttaaatgcggttgagactcagaatgaaacgggacagactcatgctcctttggcccatcagttgagtttgccaaatacttcagctgaaatggctgccattgagaagtttctgcagttttcagattctgttccgtgcaaaatccgtgccaaacggggctgtgccactcacccaagaagcattgcagagagggttagaagaactaaaattagtgagcgtatgaggaaacttcaggatcttgtcccaaacatggacaagcaaactaacacagctgatatgttggacttggctgtggattacatcaaagaccttcaaaagcaagttcagacactttcagattgtcatgcaaagtgtacgtgttcacacgagaagcaacaataa

SEQ ID NO: 879 - DNA, 948 bp, Artificial Sequence; identical to SEQ ID NO: 295
  Artificial sequence
  P25245

SEQ ID NO: 880 - DNA, 474 bp, Artificial Sequence; identical to SEQ ID NO: 311
  Artificial sequence
  P25246

SEQ ID NO: 881 - DNA, 422 bp, Artificial Sequence
  Artificial sequence
  P25092
agaccactgtgatatcgatggacgacggcggcgagccaaccaagtaccgcggcgtgcggcgccggccgtcggggaagttcgccgccgagatccgcgactccagccggcagagcgtgcgcatgtggctgggcaccttcgacacggccgaggaggccgcaagggcgtacgaccgcgcggcctacgccatgcgcggccaaatcgccgtgctcaacttccccgccgaggcgcgcaactacgtgcgcggcgggtcgtcgtcgtcccgccagcagcagcagggaggaggaggaggaggaggaagtggcggcggcgccggtcagcaggtgatcgagctggagtgcctggacgatcaggtgctgcaggagatgctcaagggcggcgacgggaaaaaatagttgttagcgtatctgatcacaggtgcacgt

SEQ ID NO: 882 - DNA, 628 bp, Artificial Sequence; identical to SEQ ID NO: 193
  Artificial sequence
  P25218

SEQ ID NO: 883 - DNA, 621 bp, Artificial Sequence
  Artificial sequence
  P25219
caatggcgacttcgctgggactgaaccctgaagatctcttcacttcgtactcgtcttcctactactcctcgccgccgttcatgtccgactacgcggcgagcttcacgccggcggccggggactccacggccttctcctcggagctcgacgaccttcaccacttcgactactcaccggcgccgatcgtcactgctgccggagccggggctgggggcggcgatcgcaacgagaagatgatgtggtgtgagggtggtggtgacgagagaagactcagaagcaacggaaggatcgggttcagaacgaggtcagaggtggagatcttggacgacggattcaagtggaggaagtacgggaagaaggccgtcaagaacagcccaaatccaaggaactactaccgctgctcgtcggagggctgcggcgtgaagaagcgggtggagagggaccgcgacgacccccgctacgtcatcaccacctacgacggcgtccacaaccacgccagccccggagccgctgctatcatcgtcccgtacggcagcggcggcggcaatagcggcttctacagcccgccgcacagcggctccccgtcggccacctcctactcgggctccctagtcttctgac

SEQ ID NO: 884 - DNA, 705 bp, Artificial Sequence; identical to SEQ ID NO: 169
  Artificial sequence
  P25573

SEQ ID NO: 885 - DNA, 957 bp, Artificial Sequence; identical to SEQ ID NO: 159
  Artificial sequence
  P25571

SEQ ID NO: 886 - DNA, 988 bp, Artificial Sequence
  Artificial sequence
  P25572
ggaagttcatttcatttggagaggacacgctgacaagctgactctagcagatctggtaccgtcgacatgctgcttaacccggcgtgcgaggcggcagcgccgatggacagcatccggcatcacctcctggacgagccggcggcggcggcgaccgcgagcgcggctccgcggccggtgtactgccgcagcacgagcttcggcagcctagtggcggaccaatggagcgagtcgctcccgttccgccccgacgacgccgacgacatggtcgtcttcggcgcgctccgcgacgccttttcccagggctggctccccgacggctccttcgccgccgtgaagcccgagcccctggcgttcccggactccccctacgagcgcggatcctatccctgccttggtggcttccttctcgcggaggggcctgagacgccgaccgaggcggcgacgacgcccgggagcgaggaggaggccgcggcggcggtgtccagggggaagcactaccgcggggtgaggcagcggccgtggggcaagttcgcggcggagatccgggacccggccaagaacggcgcgcgcgtgtggctgggcacgtacgacagcgccgaggacgccgccgtggcctacgaccgcgccgcgtaccgcatgcgcggctcccgcgcgctcctcaacttcccgctccgcatcggctccgagatcgccgcggcggccgccgccgtcgcggccactgcccctgccgcgggagacaagcgggcgtccccagagccgaccgcgagctccgactcctccccttcggcctcctctgcgacaccgaagcggaggaagagaggcgaggccgctgccgcgaccatggccatggcccttgtgccgcccccgccggcggcgcaggcgcccgtccagctgaccctcccggcccgtccgtggttcgccgccggccccgtccagcagctagtgagctaatctagacaggcctcgtaccggatcctctagctagagc

SEQ ID NO: 887 - DNA, 831 bp, Artificial Sequence
  Artificial sequence
  P25578
aggacaagatgctgctgcttaatccggcgtccgaggcggcggcggcggcgctggacagcatccggcagcagctcctggaggagccaatggcgccggcgcggccggcgtactgccggagcgcgagcttcggcagcctggtggcggaccagtggagcgagtctctcccgttccggcccaacgacgccgacgacatggtcgtctacggtgccctccgcgacgccttctcctgcggctggctccccgacggctccttcgcggccgtcaagcccgagcccctgccctcccccgactcctacgacggctgctgcctcggcagcttcctcgcgtcgccgcccgggctggacgcgccgtgggcggaggaggccgaggtcgcagcgacggcgtcaagggggaagcacttcagaggcgtgaggcagcggccgtggggcaagttcgcggcggagatccgggacccagccaagaacggcgcgcgcgtgtggctcggcaccttcgacagcgccgaggacgccgctgtggcgtacgaccgcgccgcctaccgcatgcgcggctcccgcgcgctcctcaacttcccgctccgcatcggctcggagatcgccgcagccgcgggtcagaagcgtccgtctccccagccagcgagccccgactctcctcctccctcctccagcgcacccgggtcgtcgaagcggagaaagagaggcgaggccgcagcagagtccatgtccatggctctggtgccgcccccgccggtgcaggctccggtccagctgaccctcccagtccagccgtggctcgccaccggcgccgtccagcagctagtgagctgaagcggcg

SEQ ID NO: 888 - DNA, 557 bp, Artificial Sequence; identical to SEQ ID NO: 7
  Artificial sequence
  P25657

SEQ ID NO: 889 - DNA, 4276 bp, Artificial Sequence
  Artificial sequence
  P6506
catgcctgcaggtccccagattagccttttcaatttcagaaagaatgctaacccacagatggttagagaggcttacgcagcaggtctcatcaagacgatctacccgagcaataatctccaggaaatcaaataccttcccaagaaggttaaagatgcagtcaaaagattcaggactaactgcatcaagaacacagagaaagatatatttctcaagatcagaagtactattccagtatggacgattcaaggcttgcttcacaaaccaaggcaagtaatagagattggagtctctaaaaaggtagttcccactgaatcaaaggccatggagtcaaagattcaaatagaggacctaacagaactcgccgtaaagactggcgaacagttcatacagagtctcttacgactcaatgacaagaagaaaatcttcgtcaacatggtggagcacgacacacttgtctactccaaaaatatcaaagatacagtctcagaagaccaaagggcaattgagacttttcaacaaagggtaatatccggaaacctcctcggattccattgcccagctatctgtcactttattgtgaagatagtggaaaaggaaggtggctcctacaaatgccatcattgcgataaaggaaaggccatcgttgaagatgcctctgccgacagtggtcccaaagatggacccccacccacgaggagcatcgtggaaaaagaagacgttccaaccacgtcttcaaagcaagtggattgatgtgatatctccactgacgtaagggatgacgcacaatcccactatccttcggcggccgcaagacccttcctctatataaggaagttcatttcatttggagaggacacgctcgagtataagagctcatttttacaacaattaccaacaacaacaaacaacaaacaacattacaattacatttacaattaccatggaagcgttaacggccaggcaacaagaggtgtttgatctcatccgtgatcacatcagccagacaggtatgccgccgacgcgtgcggaaatcgcgcagcgtttggggttccgttccccaaacgcggctgaagaacatctgaaggcgctggcacgcaaaggcgttattgaaattgtttccggcgcatcacgcgggattcgtctgttgcaggaagaggaagaagggttgccgctggtaggtcgtgtggctgccggtgaaccacttctggcgcaacagcatattgaaggtcattatcaggtcgatccttccttattcaagccgaatgctgatttcctgctgcgcgtcagcgggatgtcgatgaaagatatcggcattatggatggtgacttgctggcagtgcataaaactcaggatgtacgtaacggtcaggtcgttgtcgcacgtattgatgacgaagttaccgttaagcgcctgaaaaaacagggcaataaagtcgaactgttgccagaaaatagcgagtttaaaccaattgtcgtagatcttcgtcagcagagcttcaccattgaagggctggcggttggggttattcgcaacggcgactggctggaattccccaattttaatcaaagtgggaatattgctgatagctcattgtccttcactttcactaacagtagcaacggtccgaacctcataacaactcaaacaaattctcaagcgctttcacaaccaattgcctcctctaacgttcatgataacttcatgaataatgaaatcacggctagtaaaattgatgatggtaataattcaaaaccactgtcacctggttggacggaccaaactgcgtataacgcgtttggaatcactacagggatgtttaataccactacaatggatgatgtatataactatctattcgatgatgaagataccccaccaaacccaaaaaaagagtagctagagctttcgttcgtatcatcggtttcgacaacgttcgtcaagttcaatgcatcagtttcattgcgcacacaccagaatcctactgagtttgagtattatggcattgggaaaactgtttttcttgtaccatttgttgtgcttgtaatttactgtgttttttattcggttttcgctatcgaactgtgaaatggaaatggatggagaagagttaatgaatgatatggtccttttgttcattctcaaattaatattatttgttttttctcttatttgttgtgtgttgaatttgaaattataagagatatgcaaacattttgttttgagtaaaaatgtgtcaaatcgtggcctctaatgaccgaagttaatatgaggagtaaaacacttgtagttgtaccattatgcttattcactaggcaacaaatatattttcagacctagaaaagctgcaaatgttactgaatacaagtatgtcctcttgtgttttagacatttatgaactttcctttatgtaattttccagaatccttgtcagattctaatcattgctttataattatagttatactcatggatttgtagttgagtatgaaaatattttttaatgcattttatgacttgccaattgattgacaacatgcatcaatctagaacatatccatatctaatcttacctcgactgctgtatataaaaccagtggttatatgtccagtactgctgtatataaaaccagtggttatatgtacagtacgtcgatcgatcgacgactgctgtatataaaaccagtggttatatgtacagtactgctgtatataaaaccagtggttatatgtacagtacgtcgaggggatgatcaagacccttcctctatataaggaagttcatttcatttggagaggacacgctcgagtataagagctcatttttacaacaattaccaacaacaacaaacaacaaacaacattacaattacatttacaattaccatggtgagcaagggcgaggagctgttcaccggggtggtgcccatcctggtcgagctggacggcgacgtaaacggccacaagttcagcgtgtccggcgagggcgagggcgatgccacctacggcaagctgaccctgaagttcatctgcaccaccggcaagctgcccgtgccctggcccaccctcgtgaccaccctgacctacggcgtgcagtgcttcagccgctaccccgaccacatgaagcagcacgacttcttcaagtccgccatgcccgaaggctacgtccaggagcgcaccatcttcttcaaggacgacggcaactacaagacccgcgccgaggtgaagttcgagggcgacaccctggtgaaccgcatcgagctgaagggcatcgacttcaaggaggacggcaacatcctggggcacaagctggagtacaactacaacagccacaacgtctatatcatggccgacaagcagaagaacggcatcaaggtgaacttcaagatccgccacaacatcgaggacggcagcgtgcagctcgccgaccactaccagcagaacacccccatcggcgacggccccgtgctgctgcccgacaaccactacctgagcacccagtccgccctgagcaaagaccccaacgagaagcgcgatcacatggtcctgctggagttcgtgaccgccgccgggatcactctcggcatggacgagctgtacaagtccggagggatcctctagctagagctttcgttcgtatcatcggtttcgacaacgttcgtcaagttcaatgcatcagtttcattgcgcacacaccagaatcctactgagtttgagtattatggcattgggaaaactgtttttcttgtaccatttgttgtgcttgtaatttactgtgttttttattcggttttcgctatcgaactgtgaaatggaaatggatggagaagagttaatgaatgatatggtccttttgttcattctcaaattaatattatttgttttttctcttatttgttgtgtgttgaatttgaaattataagagatatgcaaacattttgttttgagtaaaaatgtgtcaaatcgtggcctctaatgaccgaagttaatatgaggagtaaaacacttgtagttgtaccattatgcttattcactaggcaacaaatatattttcagacctagaaaagctgcaaatgttactgaatacaagtatgtcctcttgtgttttagacatttatgaactttcctttatgtaattttccagaatccttgtcagattctaatcattgctttataattatagttatactcatggatttgtagttgagtatgaaaatattttttaatgcattttatgacttgccaattgattgacaacatgcatcaatcgacctgca

SEQ ID NO: 890 - DNA, 1839 bp, Artificial Sequence
  Artificial sequence
  P5486
atggaagcgttaacggccaggcaacaagaggtgtttgatctcatccgtgatcacatcagccagacaggtatgccgccgacgcgtgcggaaatcgcgcagcgtttggggttccgttccccaaacgcggctgaagaacatctgaaggcgctggcacgcaaaggcgttattgaaattgtttccggcgcatcacgcgggattcgtctgttgcaagaagaggaagaagggttgccgctggtaggtcgtgtggctgccggtgaaccacttctggcgcaacagcatattgaaggtcattatcaggtcgatccttccttattcaagccgaatgctgatttcctgctgcgcgtcagcgggatgtcgatgaaagatatcggcattatggatggtgacttgctggcagtgcataaaactcaggatgtacgtaacggtcaggtcgttgtcgcacgtattgatgacgaggttaccgttaagcgcctgaaaaaacagggcaataaagtcgaactgttgccagaaaatagcgagtttaaaccaattgtcgtagatcttcgtcagcagagcttcaccattgaagggctggcggttggggttattcgcaacggcgactggctggaattccccaattttaatcaaagtgggaatattgctgatagcgcattgtccttcactttcactaacagtagcaacggtccgaacctcataacaactcaaacaaattctcaagcgctttcacaaccaattgcctcctctaacgttcatgataacttcatgaataatgaaatcacggctagtaaaattgatgatggtaataattcaaaaccactgtcacctggttggacggaccaaactgcgtataacgcgtttggaatcactacagggatgtttaataccactacaatggatgatgtatataactatctattcgatgatgaagataccccaccaaacccaaaaaaagctgctgctgctgaggatcctgaagctcgaaaaacaaagaaaaaaatcaaagggattcagcaagccactgcaggagtctcacaagacacttcggaaaatcctaacaaaacaatagttcctgcagcattaccacagctcacccctaccttggtgtcactgctggaggtgattgaacccgaggtgttgtatgcaggatatgatagctctgttccagattcagcatggagaattatgaccacactcaacatgttaggtgggcgtcaagtgattgcagcagtgaaatgggcaaaggcgataccaggcttcagaaacttacacctggatgaccaaatgaccctgctacagtactcatggatgtttctcatggcatttgccctgggttggagatcatacagacaatcaagtggaaacctgctctgctttgctcctgatctgattattaatgagcagagaatgtctctaccctgcatgtatgaccaatgtaaacacatgctgtttgtctcctctgaattacaaagattgcaggtatcctatgaagagtatctctgtatgaaaaccttactgcttctctcctcagttcctaaggaaggtctgaagagccaagagttatttgatgagattcgaatgacttatatcaaagagctaggaaaagccatcgtcaaaagggaagggaactccagtcagaactggcaacggttttaccaactgacaaagcttctggactccatgcatgaggtggttgagaatctccttacctactgcttccagacatttttggataagaccatgagtattgaattcccagagatgttagctgaaatcatcactaatcagataccaaaatattcaaatggaaataccaaaaagcttctgtttcatcaaaaatga

SEQ ID NO: 891 - DNA, 3446 bp, Artificial Sequence
  Artificial sequence
  P5326
cacggaccttggatctgaagttatgaacaataacatatttggcaaaacaaagaaaaaagaaacaacaatactaacatattttggtaaaagaacattgagaagtctcaaaaattaacttcttcttattttgtttcctaataagaccgtttgcttcatttcaagttcttaggaaataatttcatgtaacgtgtatgtagatatgtttatgtacagataaagagagatctgaaaatgatatatagagcttttgtggtgataagtgcaacaagcaggatatatatatcgaacgtggtggttagaagatagcgtcaaaatagatgctagctgctgcgtatacatcatattcatatcatatgtacttctcttttgtgatttctcatgtgattgaacatactacataaatcttgatagatttataaaaatgcaacaaattgttgtttatataagaaaaataaaacactgatatgatatttcattagttattatcaaatttgcaatataatgtttaacatccaagatttgttttacataatcgttacggttactaaagtttaatttatgatgttttaaaacaaattgagactaaatttctaaaagaaacatatacgtacatgtgtgtagctgcgtatatatatagaatggtggggctaaaagctaatgatgtgtacattaattggacatttgatgtggctggattggacccaacttgctctttgatagagacctaactaagacaattttgctcttcattcatttctcccgtatacataattgaattaactgtacataatgtttcacaacaagcgatctagctatatatttcaaaataacagagactgatattttaatctggtcttctaagctctaacgtcaaattaaaaaaaaaatccgatcttctaattaattagaagaaatcaattatagaacctctctctttaatttcatttatttaaaactgcttggaaatttaattattcactaaagactcactattctccttaatttatgataatttgtagatcatatgttcagtttttatttatttgccattcgaatgttgagttttaattaaaccaatatgttaatattcgaattaaaaaaacttacctataattcacttatttaaaaacataaaataataataattgcatcaccgtgatacaaagcaacctcacaagtcacaactctcgtgactacaaagatcactcattaaacaaaccttcctgccttctttttttctacttgggcacctcgaccgatcgaagactattcttgggatctgcttcaaaaacgactatatgttctaaatccacttcgtatgatgacgaacatttggtttactactgaagatagagattacgtccttctaattagaagtaattaattattttagtatttggaagctaatggtggagatgtaaccgtatcttagtggatcgagatattgtatataaaatatgtatgctacatcgaataataaactgaaagagagtaaaaagggatatttaatgggaagaaaagaagggtggagatgtaacaaaggcgaagataatggatattcttgggatgttgtcttcaaggccacgagcttagattcttttagttttgctcaatttgttaagtttctacttttccttttgttgcttactacttttgctcatgatctccatatacatatcatacatatatatagtatactatctttagactgatttctctatacactatcttttaacttatgtatcgtttcaaaactcaggacgtacatgtttaaatttggttatataaccacgaccatttcaagtatatatgtcataccataccagatttaatataacttctatgaagaaaatacataaagttggattaaaatgcaagtgacatctttttagcataggttcatttggcatagaagaaatatataactaaaaatgaactttaacttaaatagattttactatattacaattttttctttttacatggtctaatttatttttctaaaattagtataattgttgttttgatgaaacaataataccgtaagcaatagttgctaaaagatgtccaaatatttataaattacaaagtaaatcaaataaggaagaagacacgtggaaaacaccaaataagagaagaaatggaaaaaacagaaagaaattttttaacaagaaaaatcaattagtcctcaaacctgagatatttaaagtaatcaactaaaacaggaacacttgactaacaaagaaatttgaaacgtggtccaactttcacttaattatattgttttctctaaggcttatgcaatatatgccttaagcaaatgccgaatctgttttttttttttttgttattggatattgactgaaaataaggggttttttcacacttgaagatctcaaaagagaaaactattacaacggaaattcattgtaaaagaagtgattaagcaaattgagcaaaggtttttatgtggtttatttcattatatgattgacatcaaattgtatatatatggttgttttatttaacaatatatatggatataacgtacaaactaaatatgtttgattgacgaaaaaaaatatatgtatgtttgattaacaacatagcacatattcaactgatttttgtcctgatcatctacaacttaataagaacacacaacattgaacaaatctttgacaaaatactatttttgggtttgaaattttgaatacttacaattattcttctcgatcttcctctctttccttaaatcctgcgtacaaatccgtcgacgcaatacattacacagttgtcaattggttctcagctctaccaaaaacatctattgccaaaagaaaggtctatttgtacttcactgttacagctgagaacattaaatataataagcaaatttgataaaacaaagggttctcaccttattccaaaagaatagtgtaaaatagggtaatagagaaatgttaataaaaggaaattaaaaatagatattttggttggttcagattttgtttcgtagatctacagggaaatctccgccgtcaatgcaaagcgaaggtgacacttggggaaggaccagtggtccgtacaatgttacttacccatttctcttcacgagacgtcgataatcaaattgtttattttcatatttttaagtccgcagttttattaaaaaatcatggacccgacattagtacgagatataccaatgagaagtcgacacgcaaatcctaaagaaaccactgtggtttttgcaaacaagagaaaccagctttagcttttccctaaaaccactcttacccaaatctctccataaataaagatcccgagactcaaacacaagtctttttataaaggaaagaaagaaaaactttcctaattggttcataccaaagtctgagctcttctttatatctctcttgtagtttcttattgggggtctttgt

SEQ ID NO: 892 - DNA, 2365 bp, Artificial Sequence
  Artificial sequence
  P5311
ggcgagtgatggtatatttattggttgggcttaaatatatttcagatgcaaaaccatattgaatcaataaattataaatacatagcttccctaaccacttaaaccaccagctacaaaaccaataaacccgatcaatcattatgttttcataggatttcctgaacatacattaaattatttttcattttcttggtgctcttttctgtcttattcacgttttaatggacataatcggtttcatattgtaaatctctttaacctaacgaacaatttaatgaccctagtaataggataagaaggtcgtgaaaaatgaacgagaaaaaacccaccaaaacactatataagaaagaccgaaaaagtaaaaagggtgagccataaaccaaaaaccttaccagatgttgtcaaagaacaaaaatcatcatccatgattaacctacgcttcactactaagacaaggcgattgtgtcccggttgaaaaggttgtaaaacagtttgaggatgctacaaaagtggatgttaagtatgaagcggctaaggttttggatttggtctaggagcacattggttaagcaatatcttcggtggagattgagtttttagagatagtagatactaattcatctatggagacatgcaaattcatcaaaatgcttggatgaattagaaaaactaggtggagaatacagtaaaaaaattcaaaaagtgcatattgtttggacaacattaatatgtacaaatagtttacatttaaatgtattattttactaattaagtacatataaagttgctaaactaaactaatataatttttgcataagtaaatttatcgttaaaagttttctttctagccactaaacaacaatacaaaatcgcccaagtcacccattaattaatttagaagtgaaaaacaaaatcttaattatatggacgatcttgtctaccatatttcaagggctacaggcctacagccgccgaataaatcttaccagccttaaaccagaacaacggcaaataagttcatgtggcggctggtgatgattcacaatttccccgacagttctatgataatgaaactatataattattgtacgtacatacatgcatgcgacgaacaacacttcaatttaattgttagtattaaattacatttatagtgaagtatgttgggacgattagacggatacaatgcacttatgttctccggaaaatgaatcatttgtgttcagagcatgactccaagagtcaaaaaagttattaaatttatttgaatttaaaacttaaaaatagtgtaatttttaaccacccgctgccgcaaacgttggcggaagaatacgcggtgttaaacaatttttgtgatcgttgtcaaacatttgtaaccgcaatctctactgcacaatctgttacgtttacaatttacaagttagtatagaagaacgttcgtacctgaagaccaaccgacctttagttattgaataaatgattatttagttaagagtaacaaaatcaatggttcaaatttgtttctcttccttacttcttaaattttaatcatggaagaaacaaagtcaacggacatccaattatggcctaatcatctcattctcctttcaacaaggcgaatcaaatcttctttatacgtaatatttatttgccagcctgaaatgtataccaaatcatttttaaattaattgcctaaattattagaacaaaaactattagtaaataactaattagtcttatgaaactagaaatcgagatagtggaatatagagagacaccattaaattcacaaaatcatttttaaattacctaaattattacaacaaaaactattagacagaactaagtctataatgaaacgagagatcgtatttggaatgtagagcgagagacaattttcaattcattgaatatataagcaaaattatatagcccgtagactttggtgagatgaagtctaagtacaaacaactgaatgaatttataatcaataatattgattatattgtgattagaaaaagaaaacaacttgcgttatttttcaatattattgtgaggattaatgtgaacatggaatcgtgtttctcctgaaaaaaatatcagcatagagcttagaacaatataaatatatccaccaaaaataacttcaacatttttatacaactaatacaaaaaaaaaaaagcaaactttttgtatatataaataaatttgaaaactcaaaggtcggtcagtacgaataagacacaacaactactataaattagaggactttgaagacaagtaggttaactagaacatccttaatttctaaacctacgcactctacaaaagattcatcaaaaggagtaaaagactaactttctc

SEQ ID NO: 893 - DNA, 4801 bp, Artificial Sequence
  Artificial sequence
  P5319
ggaccgtgtaatgggccattgggccaagttttcttgatataaaatctgaaatactactaaattacaatttttcttaaactcgatttcataattcatgtgggactcagttctccgcgtcttatgacttaagagttaagagtaaagacaattgattgtagtttgcattattaaggttgtgattttaaaggctatattggcccaggcaaagtggttatgaaagttaaaaggtattattaaatgtcgttatggactagctaaagaaaagagatggatatagaaacggatttgccagtttgtgaggttacgtactcgttactttctattgcatttttgtgtgtcattgtgcttgtgatttctttagtatatgtttttctttttgtcaaactctttagtacatgttatgctttattttcttgtttagcattgttattgttattttgatccatgttcttttacttaatgtgtagagtgttcacgtacgactctttatgatcgctatactaatatactatgaaactcgaatgagaacatgcatgtcataaatcaataaaacataacatacgacacttaacctaaatcatacattcattgattcatactatcatgatcctcatcacattagtatcatttgtctttatttattacttagctacttcgttatcttattatatctttacctgttctgctggtcatttgccataaacaccaagtacaagcaactctttagtccaatatcagaccaaattaacaaacatttccccaatccaaaacggaaatttaattataattagcatttaaataggttcgattacaaaaaaaaatcaacaaaggaacaagtcaatttcataatggtttgtcaattgtcacacaacgaaatggctagccggatcaagcatgcatgatccaaatttcaacatttccatgataacctgaattataacgtctacataaaccatatttaaataaataggatggtcgaaagatatcattaaaagaacgattcaatattctttattgttcaattgatacacatgttattctccttaaccagttatgaacatgtcctacaagtttcttgacccaaactcataatttcatataccataatcccaagttaagttttttttttttggggatcaaaatctcaagttaagttaagttcaattatttagctgtaatgctcggaaaaaagatcggatgaatatccaattggttcaatatataccccaatccggccaatctccctatctttatagcttaattattagagaatggtcaattcacgccatcagaaccagtttcatatcttcatgaaccaaaacgcctacaaccctattattcaagaaatcactataattgtccaagtaaaaccattaattaaccgagtcgatttttctatggtcctataggcatgttgttactcaaactactgattaattaataagaagttgtagtttgaaaaagaatctagctgaaaaatactcctactctaagaatttaagttagaataaaacatattaatacaaatataaaaatttagttattaaaaaagcgctactaccaagacgtcctaaagaaaaactagctttgtcttctaaaagaaaacctagcttaactacccaaaaaaatctagttttacaaacactaaagacaaattttatttttcaacaaatttaccaattaaagaaaattccatgtaggaatgtatccaaattgaaaatatccctacatattttgtaggaaaaaaggtttttataaatattaaaaaaacgagaaaaagaaaagagaaaagagaaaaaaaaaagccggagagaatggagcacatgaggtaaaaggcaagagatggcagagagaagatcagagaagggatctgcctcaatttgacaactcatatgtcatgtcatttccctcactactattattttcctatttcaaaaacacctttctctgataccatcaccttttaccttctctttttttttactgtctttgctctgtttcacattcccttctatatatacagtatagtatattttatccttcttttattgttttgcttactaaaagtttttttcctccggaatcaaaattctaaaatgtatatcatgttaggtcgcgagggccatgcaatattatgaactatgcatgatgattaatgtctgtggatccatcacaaatattattgaaggttgatcagagactatggaccaaaatggtccgaatcgcctgataataaaaaactattcatttttattttttattttttttattaaacatgtgattaatgatagatcttacgattcgcaactgggaaacatgcactaactcaaacttaaaacacacaatactaaaagttctattaaattttgaatgtaaagagaaatatattaggcaatcaaacggtcaagtaaatcatacacatcgataatttatttttttatccttcaaagcaggcccatccaaggcccaccactattctcatatcaacatacttttcttgttttggttaaatcaacctaccatgttggctgttctctccgctcctctgtgtaagatcacaccaacaccactgcataatttcttgtattattttgagacttgagagtaaactgattgacaaaaaaaaaaaaaaaaaaaaaaaattgagagtaaactagtttcttgaatattgattttttcagcttaatttgttggggaaagatattactactattgctgtaaaaaaaaaaaaaaaaaaaaaagatattattactatatttgtagtgattttattttgaaaattctcttcacttttttgtagttaacattctaattttgtgaaaagaacttttaatgtcaggtcatgtctcttaaaaagtttgcatgatgaaatgatttacaaattacaatagaaaatggaaaccattgcaaactaaatttttatcaaaaaaaatcgaaaataaaatgtattgacttagtaatgctgtgtctgctacgattaactattacacataatgcaacactgaattatccaaatacattattagaataatagtattacagtatcactattacaacaacaatgtcaacaataatcttattataataatatataaatagaccttagtgacatcatattatatagaaaacatgtggttgcctaatttgtataagctagatacttgggggtgatgagtgactagttgatgcaatgataaaagagtgaaagttttgtctgcctgattatagacgtcggagaaatactaaaatacgctatgaagattttggcgcatggtagcagaaaaaaaaaacggagggtgtgagtgagtagtggtagtcggatgtgatggaacaaagaaaagtatttttggtagggttatgggagagagaaggggaccattattacacacttacatgctttccccaaaagataccattcccattttctgacacgtgtccccctcatccccaattactcatacgtcaaatccaatttttagcctaaaagttttttttatttgtttagccaaatctattttactaattaaagttttcaaatggcaaatagaaagatcttctaaggttttataaaattacttgattatttctagttttgctcattttttaaataaaatttctcttttttttcttgcaacattattgattttttttttgatagggagtaacattagtgatgttctatctcttctcattgcaaaaactttattttctcatctctatttgatcatcattgcgaaatcttccattttcaacaaatacttttccatgttaatatgctgtttcaaaatataagtgtttggaaaataaatcaacaagtttaaatgttaactatttttatgctattataattatttttcttatgggtaagtggaaattaatgttactcaaattggacataaaattctattgtttgagtgaaggagtttataaatggagcattattttcttgaatggttagtttttcttctatcattttgacaagtaaatgacttttcagccactaaagtacaacactttttcatttaaatttaaagcatcccctacattagattgtcattttatttctcataatgttatagaaaaatgaattttgagatcccaatgtagtaaatatatataaaaaaaggtttaatattgtcaatgacaaacaacgaacttatggaatttcaacttttcacctccacgcgcctctgtcagagttttttttttccccacttgtgatgtaaaaaggggaaaacgtctgtgtctcagtcggtaaactttttctctctttttttttttaaagattttattttaattatgccgtctctgtggtctaatcgtgtacgtcgtctggttttaaaagcctctctcactttggtcttttcgttttctctcttccattttctccaactatataaaaaaaaaaaagtgagagagagagcaaatctgtgtgatggaagttgctcttgagtttgggattatttatcttttcaatatcatttggtaagcatttttattttgttttatagtaataattttaactctcttatcttcttaataagtctttgcttaatagtgttttggggtcagcattaatttcccctgtttggtttccagaatataggttgtatagtgtgataataacaaattattccaagttttgcttcaaacattgtcaaagtttttgtcattttcatttcttgaaacggaaatttttcagactttgtaatttctaattcgaaaattcgacagatcttgtagatttgtttcgatcttttagagttttgaattggagagatttatgaaacgggttgatttt

SEQ ID NO: 894 - DNA, 1176 bp, Artificial Sequence
  Artificial sequence
  P5288
tgtgaattatattttactcttcgatatcggttgttgacgattaaccatgcaaaaaagaaacattaattgcgaatgtaaataacaaaacatgtaactcttgtagatatacatgtatcgacatttaaacccgaatatatatgtatacctataatttctctgattttcacgctacctgccacgtacatgggtgataggtccaaactcacaagtaaaagtttacgtacagtgaattcgtctttttgggtataaacgtacatttaatttacacgtaagaaaggattaccaattctttcatttatggtaccagacagagttaaggcaaacaagagaaacatatagagttttgatatgttttcttggataaatattaaattgatgcaatatttagggatggacacaaggtaatatatgccttttaaggtatatgtgctatatgaatcgtttcgcatgggtactaaaattatttgtccttactttatataaacaaattccaacaaaatcaagtttttgctaaaactagtttatttgcgggttatttaattacctatcatattacttgtaatatcattcgtatgttaacgggtaaaccaaaccaaaccggatattgaactattaaaaatcttgtaaatttgacacaaactaatgaatatctaaattatgttactgctatgataacgaccatttttgtttttgagaaccataatataaattacaggtacgtgacaagtactaagtatttatatccacctttagtcacagtaccaatattgcgcctaccgggcaacgtgaacgtgatcatcaaatcaaagtagttaccaaacgctttgatctcgataaaactaaaagctgacacgtcttgctgtttcttaatttatttctcttacaacgacaattttgagaaatatgaaatttttatatcgaaagggaacagtccttatcatttgctcccatcacttgcttttgtctagttacaactggaaatcgaagagaagtattacaaaaacatttttctcgtcatttataaaaaaatgacaaaaaattaaatagagagcaaagcaagagcgttgggtgacgttggtctcttcattaactcctctcatctaccccttcctctgttcgcctttatatccttcaccttccctctctcatcttcattaactcatcttcaaaaatacc

SEQ ID NO: 895 - DNA, 1183 bp, Artificial Sequence
  Artificial sequence
  P5287
gatatgaccaaaatgattaacttgcattacagttgggaagtatcaagtaaacaacattttgtttttgtttgatatcgggaatctcaaaaccaaagtccacactagtttttggactatataatgataaaagtcagatatctactaatactagttgatcagtatattcgaaaacatgactttccaaatgtaagttatttactttttttttgctattataattaagatcaataaaaatgtctaagttttaaatctttatcattatatccaaacaatcataatcttattgttaatctctcatcaacacacagtttttaaaataaattaattaccctttgcatgataccgaagagaaacgaattcgttcaaataattttataacaggaaataaaatagataaccgaaataaacgatagaatgatttcttagtactaactcttaacaacagttttatttaaatgacttttgtaaaaaaaacaaagttaacttatacacgtacacgtgtcgaaaatattattgacaatggatagcatgattcttattagagtcatgtaaaagataaacacatgcaaatatatatatgaataatatgttgttaagataaactagacgattagaatatatagcacatctatagtttgtaaaataactatttctcaactagacttaagtcttcgaaatacataaataaacaaaactataaaaattcagaaaaaaacatgagagtacgttagtaaaatgtatttttttggtaaaataatcacttttcatcaggtcttttgtaaagcagttttcatgttagataaacgagattttaattttttttaaaaaaagaagtaaactaactatgttcctatctacacacctataattttgaacaattacaaaacaacaatgaaatgcaaagaagacgtagggcactgtcacactacaatacgattaataaatgtattttggtcgaattaataactttccatacgataaagttgaattaacatgtcaaacaaaagagatgagtggtcctatacatagttaggaattaggaacctctaaattaaatgagtacaaccaccaactactccttccctctataatctatcgcattcacaccacataacatatacgtacctactctatataacactcactccccaaactctcttcatcatccatcactacacacatc

SEQ ID NO: 896 - DNA, 1009 bp, Artificial Sequence
  Artificial sequence
  P5284
aaatggagtaatatggataatcaacgcaactatatagagaaaaaataatagcgctaccatatacgaaaaatagtaaaaaattataataatgattcagaataaattattaataactaaaaagcgtaaagaaataaattagagaataagtgatacaaaattggatgttaatggatacttcttataattgcttaaaaggaatacaagatgggaaataatgtgttattattattgatgtataaagaatttgtacaatttttgtatcaataaagttccaaaaataatctttaaaaaataaaagtacccttttatgaactttttatcaaataaatgaaatccaatattagcaaaacattgatattattactaaatatttgttaaattaaaaaatatgtcattttattttttaacagatattttttaaagtaaatgttataaattacgaaaaagggattaatgagtatcaaaacagcctaaatgggaggagacaataacagaaatttgctgtagtaaggtggcttaagtcatcatttaatttgatattataaaaattctaattagtttatagtctttcttttcctcttttgtttgtcttgtatgctaaaaaaggtatattatatctataaattatgtagcataatgaccacatctggcatcatctttacacaattcacctaaatatctcaagcgaagttttgccaaaactgaagaaaagatttgaacaacctatcaagtaacaaaaatcccaaacaatatagtcatctatattaaatcttttcaattgaagaaattgtcaaagacacatacctctatgagttttttcatcaatttttttttcttttttaaactgtatttttaaaaaaatattgaataaaacatgtcctattcattagtttgggaactttaagataaggagtgtgtaatttcagaggctattaattttgaaatgtcaagagccacataatccaatggttatggttgctcttagatgaggttattgctttaggtgaaa

SEQ ID NO: 897 - DNA, 1510 bp, Artificial Sequence
  Artificial sequence
  P9002
ggttgctatggtagggactatggggttttcggattccggtggaagtgagtggggaggcagtggcggaggtaagggagttcaagattctggaactgaagatttggggttttgcttttgaatgtttgcgtttttgtatgatgcctctgtttgtgaactttgatgtattttatctttgtgtgaaaaagagattgggttaataaaatatttgcttttttggataagaaactcttttagcggcccattaataaaggttacaaatgcaaaatcatgttagcgtcagatatttaattattcgaagatgattgtgatagatttaaaattatcctagtcaaaaagaaagagtaggttgagcagaaacagtgacatctgttgtttgtaccatacaaattagtttagattattggttaacatgttaaatggctatgcatgtgacatttagaccttatcggaattaatttgtagaattattaattaagatgttgattagttcaaacaaaaattttatattaaaaaatgtaaacgaatattttgtatgttcagtgaaagtaaaacaaattaaattaacaagaaacttatagaagaaaatttttactatttaagagaaagaaaaaaatctatcatttaatctgagtcctaaaaactgttatacttaacagttaacgcatgatttgatggaggagccatagatgcaattcaatcaaactgaaatttctgcaagaatctcaaacacggagatctcaaagtttgaaagaaaatttatttcttcgactcaaaacaaacttacgaaatttaggtagaacttatatacattatattgtaattttttgtaacaaaatgtttttattattattatagaattttactggttaaattaaaaatgaatagaaaaggtgaattaagaggagagaggaggtaaacattttcttctattttttcatattttcaggataaattattgtaaaagtttacaagatttccatttgactagtgtaaatgaggaatattctctagtaagatcattatttcatctacttcttttatcttctaccagtagaggaataaacaatatttagctcctttgtaaatacaaattaattttccttcttgacatcattcaattttaattttacgtataaaataaaagatcatacctattagaacgattaaggagaaatacaattcgaatgagaaggatgtgccgtttgttataataaacagccacacgacgtaaacgtaaaatgaccacatgatgggccaatagacatggaccgactactaataatagtaagttacattttaggatggaataaatatcataccgacatcagttttgaaagaaaagggaaaaaaagaaaaaataaataaaagatatactaccgacatgagttccaaaaagcaaaaaaaaagatcaagccgacacagacacgcgtagagagcaaaatgactttgacgtcacaccacgaaaacagacgcttcatacgtgtccctttatctctctcagtctctctat

SEQ ID NO: 898 - DNA, 922 bp, Artificial Sequence
  Artificial sequence
  P5310
caatcaactaaatggacttttcttgtgcattggtcccatttttacgccctaatattcgcttacttgcttttttgtattttatttattttagttttaattttatctacctccaaattgatagaaataattacacttatagtccttttgaaaaattataattatagcattcaagtaaataaaaatacgtatttttagtcactttgtaatgtataattttgagttgaaaatgtatcaaaagtaaatttatattcttaagatatggataaagtttacatatacattatccgtttcataccctatttatagtattacattgcataagttattgtagatcttgatcgaaagtatgtgatattaatactatttttagaattatgttattctcagttatggagtgatatttaaaatcaatatagtatatcgataatcagatagtttaattcttattttctccatccaatttatataatgatattataatcaattttacgaatgagatggatattttgaaatttttagtttaaaataaattttaaattttttgtgggtctataaattatctaattaagaggtaaaatagaaagtttgaaattaattattacttactaaatatataaatatgtcattttttcttaaactgatttagaagaaaagagtgtcatatacatggacagaacgaatataatttgataattaaatttgtaaagattcatagttaatagggatcaaaattgcacgtatccattactataaggtcatatttgcttcataaaaatcatcaggatcaaaaatcagaatttatattatatttgagggactaaaaatgctaatatcacaaattaaaattagtctataaatattcacactttactcttctaattccatcaaatatttccatttatcttctcttcttcttaaatat

SEQ ID NO: 899 - DNA, 4361 bp, Artificial Sequence
  Artificial sequence
  P5318
agaatgtagcaatacaaatatatgacggtaccgttatccatcaccattatatgtatatatgtataatttgataaatattcactttgtgtttcgtcgtttgcttaataaacagctcatttccatggtattgagtcttctatatgcgagagaatcagattcccgctgggataacaaaagaacaaggtactgaaaaaaatagacaaaacttttttttaaattatataagctataaaagaaaagagtatagagagagattagccctactgtttaagagggagagagtagggtcattagggctttagagagagaagacattcggactgtccccacttgcttttctgtagaataacattatttaaatcttatttttaattaaatattacaactaaaagaagaaaccaacttttaaaataaatgcagattatatgctctgacttggactaaataaaacttgcaagtaacagtttcaagtccttttgttttagaactttttctttcgtagaagtgataaatgattgccctagacctgatagattctctaaaattctacgtattacagcataagttacctcctttatttgactattagaccatccatattggtgggcttttagcaaatgttcttaacaataattttataatttattttaatgttaagaggtttgataattttttttttttaagagtgtattttgtttattaaaatgtgttttgtttcttatataagaaccaaatcttaactattttaccaattaaacattaaatttaaattttaatatctctaagaattatattaagagccaatatagatgcttttaaaaccattggttgaataaataaatctaaccttcttaattatttctgtgtgaatattttctaaattttcattttaatttagcacaatataatccatgttctaaaaagaacaattaacataatatttacaaacctaaaaagattataaaacacaattttattttttacagcttataatgttttaaagttcaggtttattttttaaaagttcaggtttattacattaggtttgacttgtaatcatcatttatcacaacgatcaaactattattacaatcacaatagtagacaaaatttaggatatatatatatatatataattatgtataaactatgaacatttaaagtgagatttttcaaaataatatataaattcaaatagaaatagactatttggttcttaaatgagagacccccgaaaaaatctttttttttttctcatcaagctgtttacatttttagatataaaatcatattctttatagtttagaatatgaattaaatagttttatatgttattaacttatcataagatatgcgtgaggttggccaaaaactcatcaattaaccaaataagaaaagtaaaattgtattttgctttgctaaaaatgtaaatatttcattgaaaaatgaaaaaggtttaggtaatacaattaagtaaatcctacaattttggttccatggcaaaagaataaaattgtattgctttggtaaaagttgatccaactaatatattcagtagaaactgcaaaactgaagaaataagtttgtttagtagaattgctttcggttatgtaatgaatatacatccaaaatggctttttagtaatgatgtcttttcatactctttccaatccctactactttcagattatttgtcctactattatagagatatacgttcgttttcaataatatgaaaagtgatatatatttaaatagtgtgatatatatataagttttgcaagtgcatcacttcccaaaatcgcataaatcattaatcatattgtcgaaaacagtataataacttcttaaacgaaaacgcagcgcaattaaaaataacaactagagataattgacaaaacattgattaatatttacctataagttaattattgtatttaaaatttatttaaagttcataaggaaaacatatgcaaaaatatttatatctaatattttgctatgttatccttttttttttttacgttatcctaattttgtttatcctaatttgttgtggttaaaatcttattattgataaaaagagaacttttttttttgtcatcataaaaaagagaacttattacttcgattttaaaattctatgagcgtaggagacaaagaaaaaaaaaataaaaaaaaaaagaagagaaaaatcacttcttttcttctttttagtccagatccaacatattttggataactaaatgaagattttttaaaaaaatatattttagggtatatataaatcataatttgaagcaaatgaaataaaatccagtttggtaatatataaatatgatttgatgggttccttgtaatctctctctatctattagtttctcagttatcttttctttgccagaaatggcagtgaaggcagtggctgaggagagagttttttttcttctttcatggggaaagtaaaactttgccttgaagatttctctcttcaatatttttctaagacttttgatttcaacgaatcactgtccttaacctaaaagcaagaaaaattagctttatactggtctttacttttttttaacatatttatttttatatagtttacttataaacatagacatacgagtatgggaatatatagtatatccaacttctaaataatatttcgaatagtgataacaaaattagcaatacatacggctagtgaaatgttgatcgaataaacggcactgatgtaatgtacttatcaattttgataattttaattgtattgtttttctttttttcccacagtattgaactagacaattaaatttaaagtaaaattatacatttctttcgttgtgtattaaagtaacatgcataatatcattttccttcgtacaatcctccaaattgacaattgatgaattactttgtcaatcgtaaatgaatttttctcaagtctgtatactattttcagggataaacaggtacaggtgtcccatgcttattctcttgatagtaacatgtgtcctatgttgagtcaattctacgttcgaagaagtgctaacaattgttaatagcctcgtatattattctaattaaaatgcctcgatagatttggttagtggtctgaatgtgattggttattttttcaagtggcaagaggtctaccatctaatattacaatcaatcgaccaaaaaggtcgagaacatgataatggtggcaaatacaaatggttcattgttgtctaatataacaagccatcagttgtcactttttaaaaacaatacagaatacaagatactttttttttaaggtaaaatgtgtgtttaatattttcgtttatataacaaataaacagttacatgttttactctatgattatatttatgacatttttcttcttcttaacaacatttttttcccataagaacatttacaatagtattaaaactttgattgcaatcaaatgttagatcacttattataaaattactaagactgctatcttttcctattgacaaaagcgaatccaatatatgttactgaaacaaatgcgtaaattatactatatggagatctatcggttaattattgagagaatctaagaaagtttttgagtacaacagtcctaataatatcttcacataccatataatatacatatatacatatacacaaatgtactttttaaaccaacatcagcatacgtatatcccatcaggaaacttagacttttgggaattcatggtatgaaaaccaaaaccaaatgacaacattcgatttgatactcccgacccatggtaaagaaataacaaattccaatatatctttcactggactttccgaggcacattccggttttctccatttcaagaaattgtcaaaaataaattgagatccggtttattacctcaaaaaagaagaagagaaattacaacattaatttccgaaaaggcataaatgagaaatcatatttcagcagaagaacacaaaagagttaagaacccacagatcacacaacctctgtccatgtctgctttttacacttttttaaaataagtttctcctaaaaagttatttcctatttataataatttccttagatttatcttcctggtctctcttctgctgcttccctctcccccataactatcactatttagaattttcaatgtggaaaaggaagctgattgttgaagcataaatcccgggagaccacttttgcattttcaaataattaaattaaaccatagatacacacacacagttacttactcttttagggtttcccaataaatttatagtactttaatgtgtttcatgatattgatgataaatgctagctgtatttacaatgggggctcct

SEQ ID NO: 900 - DNA, 2244 bp, Artificial Sequence
  Artificial sequence
  P5290
aactaggggtgcataatgatggaacaaagcacaaatcttttaacgcaaactaactacaaccttcttttggggtccccatccccgaccctaatgttttggaattaataaaactacaatcacttaccaaaaaataaaagttcaaggccactataatttctcatatgaacctacatttataaataaaatctggtttcatattaatttcacacaccaagttactttctattattaactgttataatggaccatgaaatcatttgcatatgaactgcaatgatacataatccactttgttttgtgggagacatttaccagatttcggtaaattggtattcccccttttatgtgattggtcattgatcattgttagtggccagacatttgaactcccgtttttttgtctataagaattcggaaacatatagtatcctttgaaaacggagaaacaaataacaatgtggacaaactagatataatttcaacacaagactatgggaatgattttacccactaattataatccgatcacaaggtttcaacgaactagttttccagatatcaaccaaatttactttggaattaaactaacttaaaactaattggttgttcgtaaatggtgctttttttttttgcggatgttagtaaagggttttatgtattttatattattagttatctgttttcagtgttatgttgtctcatccataaagtttatatgttttttctttgctctataacttatatatatatatgagtttacagttatatttatacatttcagatacttgatcggcattttttttggtaaaaaatatatgcatgaaaaactcaagtgtttcttttttaaggaatttttaaatggtgattatatgaatataatcatatgtatatccgtatatatatgtagccagatagttaattatttgggggatatttgaattattaatgttataatattctttcttttgactcgtctggttaaattaaagaacaaaaaaaacacatacttttactgttttaaaaggttaaattaacataatttattgattacaagtgtcaagtccatgacattgcatgtaggttcgagacttcagagataacggaagagatcgataattgtgatcgtaacatccagatatgtatgtttaattttcatttagatgtggatcagagaagataagtcaaactgtcttcataatttaagacaacctcttttaatattttcccaaaacatgttttatgtaactactttgcttatgtgattgcctgaggatactattattctctgtctttattctcttcacaccacatttaaatagtttaagagcatagaaattaattattttcaaaaaggtgattatatgcatgcaaaatagcacaccatttatgtttatattttcaaattatttaatacatttcaatatttcataagtgtgattttttttttttttgtcaatttcataagtgtgatttgtcatttgtattaaacaattgtatcgcgcagtacaaataaacagtgggagaggtgaaaatgcagttataaaactgtccaataatttactaacacatttaaatatctaaaaagagtgtttcaaaaaaaattcttttgaaataagaaaagtgatagatatttttacgctttcgtctgaaaataaaacaataatagtttattagaaaaatgttatcaccgaaaattattctagtgccactcgctcggatcgaaattcgaaagttatattctttctctttacctaatataaaaatcacaagaaaaatcaatccgaatatatctatcaacatagtatatgcccttacatattgtttctgacttttctctatccgaatttctcgcttcatggtttttttttaacatattctcatttaattttcattactattatataactaaaagatggaaataaaataaagtgtctttgagaatcgaacgtccatatcagtaagatagtttgtgtgaaggtaaaatctaaaagatttaagttccaaaaacagaaaataatatattacgctaaaaaagaagaaaataattaaatacaaaacagaaaaaaataatatacgacagacacgtgtcacgaagataccctacgctatagacacagctctgttttctcttttctatgcctcaaggctctcttaacttcactgtctcctcttcggataatcctatccttctcttcctataaatacctctccactcttcctcttcctccaccactacaaccacca

SEQ ID NO: 901 - DNA, 4566 bp, Artificial sequence
  Artificial sequence
  pMEN001 (T-DNA)
cctgtggttggcatgcacatacaaatggacgaacggataaaccttttcacgcccttttaaatatccgattattctaataaacgctcttttctcttaggtttacccgccaatatatcctgtcaaacactgatagtttaaactgaaggcgggaaacgacaatctgatcatgagcggagaattaagggagtcacgttatgacccccgccgatgacgcgggacaagccgttttacgtttggaactgacagaaccgcaacgttgaaggagccactcagccgcgggtttctggagtttaatgagctaagcacatacgtcagaaaccattattgcgcgttcaaaagtcgcctaaggtcactatcagctagcaaatatttcttgtcaaaaatgctccactgacgttccataaattcccctcggtatccaattagagtctcatattcactctcaatccaaataatctgcaccggatctggatcgtttcgcatgattgaacaagatggattgcacgcaggttctccggccgcttgggtggagaggctattcggctatgactgggcacaacagacaatcggctgctctgatgccgccgtgttccggctgtcagcgcaggggcgcccggttctttttgtcaagaccgacctgtccggtgccctgaatgaactgcaggacgaggcagcgcggctatcgtggctggccacgacgggcgttccttgcgcagctgtgctcgacgttgtcactgaagcgggaagggactggctgctattgggcgaagtgccggggcaggatctcctgtcatctcaccttgctcctgccgagaaagtatccatcatggctgatgcaatgcggcggctgcatacgcttgatccggctacctgcccattcgaccaccaagcgaaacatcgcatcgagcgagcacgtactcggatggaagccggtcttgtcgatcaggatgatctggacgaagagcatcaggggctcgcgccagccgaactgttcgccaggctcaaggcgcgcatgcccgacggcgatgatctcgtcgtgacccatggcgatgcctgcttgccgaatatcatggtggaaaatggccgcttttctggattcatcgactgtggccggctgggtgtggcggaccgctatcaggacatagcgttggctacccgtgatattgctgaagagcttggcggcgaatgggctgaccgcttcctcgtgctttacggtatcgccgctcccgattcgcagcgcatcgccttctatcgccttcttgacgagttcttctgagcgggactctggggttcgaaatgaccgaccaagcgacgcccaacctgccatcacgagatttcgattccaccgccgccttctatgaaaggttgggcttcggaatcgttttccgggacgccggctggatgatcctccagcgcggggatctcatgctggagttcttcgcccacgggatctctgcggaacaggcggtcgaaggtgccgatatcattacgacagcaacggccgacaagcacaacgccacgatcctgagcgacaatatgatcgggcccggcgtccacatcaacggcgtcggcggcgactgcccaggcaagaccgagatgcaccgcgatatcttgctgcgttcggatattttcgtggagttcccgccacagacccggatgatccccgatcgttcaaacatttggcaataaagtttcttaagattgaatcctgttgccggtcttgcgatgattatcatataatttctgttgaattacgttaagcatgtaataattaacatgtaatgcatgacgttatttatgagatgggtttttatgattagagtcccgcaattatacatttaatacgcgatagaaaacaaaatatagcgcgcaaactaggataaattatcgcgcgcggtgtcatctatgttactagatcgggcctcctgtcaatgctggcggcggctctggtggtggttctggtggcggctctgagggtggtggctctgagggtggcggttctgagggtggcggctctgagggaggcggttccggtggtggctctggttccggtgattttgattatgaaaagatggcaaacgctaataagggggctatgaccgaaaatgccgatgaaaacgcgctacagtctgacgctaaaggcaaacttgattctgtcgctactgattacggtgctgctatcgatggtttcattggtgacgtttccggccttgctaatggtaatggtgctactggtgattttgctggctctaattcccaaatggctcaagtcggtgacggtgataattcacctttaatgaataatttccgtcaatatttaccttccctccctcaatcggttgaatgtcgcccttttgtctttggcccaatacgcaaaccgcctctccccgcgcgttggccgattcattaatgcagctggcacgacaggtttcccgactggaaagcgggcagtgagcgcaacgcaattaatgtgagttagctcactcattaggcaccccaggctttacactttatgcttccggctcgtatgttgtgtggaattgtgagcggataacaatttcacacaggaaacagctatgaccatgattacgccaagcttgcatgcctgcaggtccccagattagccttttcaatttcagaaagaatgctaacccacagatggttagagaggcttacgcagcaggtctcatcaagacgatctacccgagcaataatctccaggaaatcaaataccttcccaagaaggttaaagatgcagtcaaaagattcaggactaactgcatcaagaacacagagaaagatatatttctcaagatcagaagtactattccagtatggacgattcaaggcttgcttcacaaaccaaggcaagtaatagagattggagtctctaaaaaggtagttcccactgaatcaaaggccatggagtcaaagattcaaatagaggacctaacagaactcgccgtaaagactggcgaacagttcatacagagtctcttacgactcaatgacaagaagaaaatcttcgtcaacatggtggagcacgacacacttgtctactccaaaaatatcaaagatacagtctcagaagaccaaagggcaattgagacttttcaacaaagggtaatatccggaaacctcctcggattccattgcccagctatctgtcactttattgtgaagatagtggaaaaggaaggtggctcctacaaatgccatcattgcgataaaggaaaggccatcgttgaagatgcctctgccgacagtggtcccaaagatggacccccacccacgaggagcatcgtggaaaaagaagacgttccaaccacgtcttcaaagcaagtggattgatgtgatatctccactgacgtaagggatgacgcacaatcccactatccttcgcaagacccttcctctatataaggaagttcatttcatttggagagaacacgggggactctagcgggccccccctcgaggtcgacggtatcgataagcttgatatcgaattcctgcagcccgggggatccactagttctagagcggccgccaccgcggtggagctcgaatttccccgatcgttcaaacatttggcaataaagtttcttaagattgaatcctgttgccggtcttgcgatgattatcatataatttctgttgaattacgttaagcatgtaataattaacatgtaatgcatgacgttatttatgagatgggtttttatgattagagtcccgcaattatacatttaatacgcgatagaaaacaaaatatagcgcgcaaactaggataaattatcgcgcgcggtgtcatctatgttactagatcgggaattcactggccgtcgttttacaacgtcgtgactgggaaaaccctggcgttacccaacttaatcgccttgcagcacatccccctttcgccagctggcgtaatagcgaagaggcccgcaccgatcgcccttcccaacagttgcgcagcctgaatggcgcccgctcctttcgctttcttcccttcctttctcgccacgttcgccggctttccccgtcaagctctaaatcgggggctccctttagggttccgatttagtgctttacggcacctcgaccccaaaaaacttgatttgggtgatggttcacgtagtgggccatcgccctgatagacggtttttcgccctttgacgttggagtccacgttctttaatagtggactcttgttccaaactggaacaacactcaaccctatctcgggctattcttttgatttataagggattttgccgatttcggaaccaccatcaaacaggattttcgcctgctggggcaaaccagcgtggaccgcttgctgcaactctctcagggccaggcggtgaagggcaatcagctgttgcccgtctcactggtgaaaagaaaaaccaccccagtacattaaaaacgtccgcaatgtgttattaagttgtctaagcgtcaatttgtttacaccacaatatatcctgccaccagccagccaacagctccccgaccggcagctcggcacaaaatcaccactcgatacaggcagcccatcag

SEQ ID NO: 902 - DNA, 1394 bp, Artificial sequence
  Artificial sequence
  misc_feature (7)..(10): n is a, c, g, or t
  misc_feature (17)..(52): n is a, c, g, or t
  pMEN20 (35S::MCS::E9)
aagcttnnnnctgcagnnnnnnnnnnnnnnnnnnnnnnnnnnnnnnnnnnnntcggattccattgcccagctatctgtcactttattgtgaagatagtgaaaaagaaggtggctcctacaaatgccatcattgcgataaaggaaaggccatcgttgaagatgcctctgccgacagtggtcccaaagatggacccccacccacgaggagcatcgtggaaaaagaagacgttccaaccacgtcttcaaagcaagtggattgatgtgatggtccgattgagacttttcaacaaagggtaatatccggaaacctcctcggattccattgcccagctatctgtcactttattgtgaagatagtggaaaaggaaggtggctcctacaaatgccatcattgcgataaaggaaaggccatcgttgaagatgcctctgccgacagtggtcccaaagatggacccccacccacgaggagcatcgtggaaaaagaagacgttccaaccacgtcttcaaagcaagtggattgatgtgatatctccactgacgtaagggatgacgcacaatcccactatccttcgcaagacccttcctctatataaggaagttcatttcatttggagaggacacgctgacaagctgactctagcagatctggtaccgtcgacggtgagctccgcggccgctctagacaggcctcgtaccggatcctctagctagagctttcgttcgtatcatcggtttcgacaacgttcgtcaagttcaatgcatcagtttcattgcgcacacaccagaatcctactgagtttgagtattatggcattgggaaaactgtttttcttgtaccatttgttgtgcttgtaatttactgtgttttttattcggttttcgctatcgaactgtgaaatggaaatggatggagaagagttaatgaatgatatggtccttttgttcattctcaaattaatattatttgttttttctcttatttgttgtgtgttgaatttgaaattataagagatatgcaaacattttgttttgagtaaaaatgtgtcaaatcgtggcctctaatgaccgaagttaatatgaggagtaaaacacttgtagttgtaccattatgcttattcactaggcaacaaatatattttcagacctagaaaagctgcaaatgttactgaatacaagtatgtcctcttgtgttttagacatttatgaactttcctttatgtaattttccagaatccttgtcagattctaatcattgctttataattatagttatactcatggatttgtagttgagtatgaaaatattttttaatgcattttatgacttgccaattgattgacaacatgcatcaatcgacctgcagccactcgaagcggccggccgccactcgaga

SEQ ID NO: 903 - DNA, 3158 bp, Artificial sequence
  Artificial sequence
  misc_feature (7)..(10): n is a, c, g, or t
  misc_feature (17)..(52): n is a, c, g, or t
  pMEN065 Overexpression Vector
aagcttnnnnctgcagnnnnnnnnnnnnnnnnnnnnnnnnnnnnnnnnnnnntcggattccattgcccagctatctgtcactttattgtgaagatagtgaaaaagaaggtggctcctacaaatgccatcattgcgataaaggaaaggccatcgttgaagatgcctctgccgacagtggtcccaaagatggacccccacccacgaggagcatcgtggaaaaagaagacgttccaaccacgtcttcaaagcaagtggattgatgtgatggtccgattgagacttttcaacaaagggtaatatccggaaacctcctcggattccattgcccagctatctgtcactttattgtgaagatagtggaaaaggaaggtggctcctacaaatgccatcattgcgataaaggaaaggccatcgttgaagatgcctctgccgacagtggtcccaaagatggacccccacccacgaggagcatcgtggaaaaagaagacgttccaaccacgtcttcaaagcaagtggattgatgtgatatctccactgacgtaagggatgacgcacaatcccactatccttcgcaagacccttcctctatataaggaagttcatttcatttggagaggacacgctgacaagctgactctagcagatctggtaccgtcgacggtgagctccgcggccgctctagacaggcctcgtaccggatcctctagctagagctttcgttcgtatcatcggtttcgacaacgttcgtcaagttcaatgcatcagtttcattgcgcacacaccagaatcctactgagtttgagtattatggcattgggaaaactgtttttcttgtaccatttgttgtgcttgtaatttactgtgttttttattcggttttcgctatcgaactgtgaaatggaaatggatggagaagagttaatgaatgatatggtccttttgttcattctcaaattaatattatttgttttttctcttatttgttgtgtgttgaatttgaaattataagagatatgcaaacattttgttttgagtaaaaatgtgtcaaatcgtggcctctaatgaccgaagttaatatgaggagtaaaacacttgtagttgtaccattatgcttattcactaggcaacaaatatattttcagacctagaaaagctgcaaatgttactgaatacaagtatgtcctcttgtgttttagacatttatgaactttcctttatgtaattttccagaatccttgtcagattctaatcattgctttataattatagttatactcatggatttgtagttgagtatgaaaatattttttaatgcattttatgacttgccaattgattgacaacatgcatcaatcgacctgcagccactcgaagcggccggccgccactcgagatcatgagcggagaattaagggagtcacgttatgacccccgccgatgacgcgggacaagccgttttacgtttggaactgacagaaccgcaacgttgaaggagccactcagccgcgggtttctggagtttaatgagctaagcacatacgtcagaaaccattattgcgcgttcaaaagtcgcctaaggtcactatcagctagcaaatatttcttgtcaaaaatgctccactgacgttccataaattcccctcggtatccaattagagtctcatattcactctcaatccaaataatctgcaccggatctggatcgtttcgcatgattgaacaagatggattgcacgcaggttctccggccgcttgggtggagaggctattcggctatgactgggcacaacagacaatcggctgctctgatgccgccgtgttccggctgtcagcgcaggggcgcccggttctttttgtcaagaccgacctgtccggtgccctgaatgaactgcaggacgaggcagcgcggctatcgtggctggccacgacgggcgttccttgcgcagctgtgctcgacgttgtcactgaagcgggaagggactggctgctattgggcgaagtgccggggcaggatctcctgtcatctcaccttgctcctgccgagaaagtatccatcatggctgatgcaatgcggcggctgcatacgcttgatccggctacctgcccattcgaccaccaagcgaaacatcgcatcgagcgagcacgtactcggatggaagccggtcttgtcgatcaggatgatctggacgaagagcatcaggggctcgcgccagccgaactgttcgccaggctcaaggcgcgcatgcccgacggcgaggatctcgtcgtgacccatggcgatgcctgcttgccgaatatcatggtggaaaatggccgcttttctggattcatcgactgtggccggctgggtgtggcggaccgctatcaggacatagcgttggctacccgtgatattgctgaagagcttggcggcgaatgggctgaccgcttcctcgtgctttacggtatcgccgctcccgattcgcagcgcatcgccttctatcgccttcttgacgagttcttctgagcgggactctggggttcgaaatgaccgaccaagcgacgcccaacctgccatcacgagatttcgattccaccgccgccttctatgaaaggttgggcttcggaatcgttttccgggacgccggctggatgatcctccagcgcggggatctcatgctggagttcttcgcccacgggatctctgcggaacaggcggtcgaaggtgccgatatcattacgacagcaacggccgacaagcacaacgccacgatcctgagcgacaatatgatcgggcccggcgtccacatcaacggcgtcggcggcgactgcccaggcaagaccgagatgcaccgcgatatcttgctgcgttcggatattttcgtggagttcccgccacagacccggatgatccccgatcgttcaaacatttggcaataaagtttcttaagattgaatcctgttgccggtcttgcgatgattatcatataatttctgttgaattacgttaagcatgtaataattaacatgtaatgcatgacgttatttatgagatgggtttttatgattagagtcccgcaattatacatttaatacgcgatagaaaacaaaatatagcgcgcaaactaggataaattatcgcgcgcggtgtcatctatgttactagatcgggctcgaga

SEQ ID NO: 904 - DNA, 4856 bp, Artificial sequence
  Artificial sequence
  misc_feature (7)..(10): n is a, c, g, or t
  misc_feature (17)..(52): n is a, c, g, or t
  pMEN1963 (T-DNA)
aagcttnnnnctgcagnnnnnnnnnnnnnnnnnnnnnnnnnnnnnnnnnnnntcggattccattgcccagctatctgtcactttattgtgaagatagtgaaaaagaaggtggctcctacaaatgccatcattgcgataaaggaaaggccatcgttgaagatgcctctgccgacagtggtcccaaagatggacccccacccacgaggagcatcgtggaaaaagaagacgttccaaccacgtcttcaaagcaagtggattgatgtgatggtccgattgagacttttcaacaaagggtaatatccggaaacctcctcggattccattgcccagctatctgtcactttattgtgaagatagtggaaaaggaaggtggctcctacaaatgccatcattgcgataaaggaaaggccatcgttgaagatgcctctgccgacagtggtcccaaagatggacccccacccacgaggagcatcgtggaaaaagaagacgttccaaccacgtcttcaaagcaagtggattgatgtgatatctccactgacgtaagggatgacgcacaatcccactatccttcgcaagacccttcctctatataaggaagttcatttcatttggagaggacacgctgacaagctgactctagcagatctggtaccgtcgaatcacaagtttgtacaaaaaagctgaacgagaaacgtaaaatgatataaatatcaatatattaaattagattttgcataaaaaacagactacataatactgtaaaacacaacatatccagtcactatggcggccgcattaggcaccccaggctttacactttatgcttccggctcgtataatgtgtggattttgagttaggatccgtcgagattttcaggagctaaggaagctaaaatggagaaaaaaatcactggatataccaccgttgatatatcccaatggcatcgtaaagaacattttgaggcatttcagtcagttgctcaatgtacctataaccagaccgttcagctggatattacggcctttttaaagaccgtaaagaaaaataagcacaagttttatccggcctttattcacattcttgcccgcctgatgaatgctcatccggaattccgtatggcaatgaaagacggtgagctggtgatatgggatagtgttcacccttgttacaccgttttccatgagcaaactgaaacgttttcatcgctctggagtgaataccacgacgatttccggcagtttctacacatatattcgcaagatgtggcgtgttacggtgaaaacctggcctatttccctaaagggtttattgagaatatgtttttcgtctcagccaatccctgggtgagtttcaccagttttgatttaaacgtggccaatatggacaacttcttcgcccccgttttcaccatgggcaaatattatacgcaaggcgacaaggtgctgatgccgctggcgattcaggttcatcatgccgtctgtgatggcttccatgtcggcagaatgcttaatgaattacaacagtactgcgatgagtggcagggcggggcgtaaagatctggatccggcttactaaaagccagataacagtatgcgtatttgcgcgctgatttttgcggtataagaatatatactgatatgtatacccgaagtatgtcaaaaagaggtatgctatgaagcagcgtattacagtgacagttgacagcgacagctatcagttgctcaaggcatatatgatgtcaatatctccggtctggtaagcacaaccatgcagaatgaagcccgtcgtctgcgtgccgaacgctggaaagcggaaaatcaggaagggatggctgaggtcgcccggtttattgaaatgaacggctcttttgctgacgagaacaggggctggtgaaatgcagtttaaggtttacacctataaaagagagagccgttatcgtctgtttgtggatgtacagagtgatattattgacacgcccgggcgacggatggtgatccccctggccagtgcacgtctgctgtcagataaagtctcccgtgaactttacccggtggtgcatatcggggatgaaagctggcgcatgatgaccaccgatatggccagtgtgccggtctccgttatcggggaagaagtggctgatctcagccaccgcgaaaatgacatcaaaaacgccattaacctgatgttctggggaatataaatgtcaggctcccttatacacagccagtctgcaggtcgaccatagtgactggatatgttgtgttttacagtattatgtagtctgttttttatgcaaaatctaatttaatatattgatatttatatcattttacgtttctcgttcagctttcttgtacaaagtggtgatggccgctctagacaggcctcgtaccggatcctctagctagagctttcgttcgtatcatcggtttcgacaacgttcgtcaagttcaatgcatcagtttcattgcgcacacaccagaatcctactgagtttgagtattatggcattgggaaaactgtttttcttgtaccatttgttgtgcttgtaatttactgtgttttttattcggttttcgctatcgaactgtgaaatggaaatggatggagaagagttaatgaatgatatggtccttttgttcattctcaaattaatattatttgttttttctcttatttgttgtgtgttgaatttgaaattataagagatatgcaaacattttgttttgagtaaaaatgtgtcaaatcgtggcctctaatgaccgaagttaatatgaggagtaaaacacttgtagttgtaccattatgcttattcactaggcaacaaatatattttcagacctagaaaagctgcaaatgttactgaatacaagtatgtcctcttgtgttttagacatttatgaactttcctttatgtaattttccagaatccttgtcagattctaatcattgctttataattatagttatactcatggatttgtagttgagtatgaaaatattttttaatgcattttatgacttgccaattgattgacaacatgcatcaatcgacctgcagccactcgaagcggccggccgccactcgagatcatgagcggagaattaagggagtcacgttatgacccccgccgatgacgcgggacaagccgttttacgtttggaactgacagaaccgcaacgttgaaggagccactcagccgcgggtttctggagtttaatgagctaagcacatacgtcagaaaccattattgcgcgttcaaaagtcgcctaaggtcactatcagctagcaaatatttcttgtcaaaaatgctccactgacgttccataaattcccctcggtatccaattagagtctcatattcactctcaatccaaataatctgcaccggatctggatcgtttcgcatgattgaacaagatggattgcacgcaggttctccggccgcttgggtggagaggctattcggctatgactgggcacaacagacaatcggctgctctgatgccgccgtgttccggctgtcagcgcaggggcgcccggttctttttgtcaagaccgacctgtccggtgccctgaatgaactgcaggacgaggcagcgcggctatcgtggctggccacgacgggcgttccttgcgcagctgtgctcgacgttgtcactgaagcgggaagggactggctgctattgggcgaagtgccggggcaggatctcctgtcatctcaccttgctcctgccgagaaagtatccatcatggctgatgcaatgcggcggctgcatacgcttgatccggctacctgcccattcgaccaccaagcgaaacatcgcatcgagcgagcacgtactcggatggaagccggtcttgtcgatcaggatgatctggacgaagagcatcaggggctcgcgccagccgaactgttcgccaggctcaaggcgcgcatgcccgacggcgaggatctcgtcgtgacccatggcgatgcctgcttgccgaatatcatggtggaaaatggccgcttttctggattcatcgactgtggccggctgggtgtggcggaccgctatcaggacatagcgttggctacccgtgatattgctgaagagcttggcggcgaatgggctgaccgcttcctcgtgctttacggtatcgccgctcccgattcgcagcgcatcgccttctatcgccttcttgacgagttcttctgagcgggactctggggttcgaaatgaccgaccaagcgacgcccaacctgccatcacgagatttcgattccaccgccgccttctatgaaaggttgggcttcggaatcgttttccgggacgccggctggatgatcctccagcgcggggatctcatgctggagttcttcgcccacgggatctctgcggaacaggcggtcgaaggtgccgatatcattacgacagcaacggccgacaagcacaacgccacgatcctgagcgacaatatgatcgggcccggcgtccacatcaacggcgtcggcggcgactgcccaggcaagaccgagatgcaccgcgatatcttgctgcgttcggatattttcgtggagttcccgccacagacccggatgatccccgatcgttcaaacatttggcaataaagtttcttaagattgaatcctgttgccggtcttgcgatgattatcatataatttctgttgaattacgttaagcatgtaataattaacatgtaatgcatgacgttatttatgagatgggtttttatgattagagtcccgcaattatacatttaatacgcgatagaaaacaaaatatagcgcgcaaactaggataaattatcgcgcgcggtgtcatctatgttactagatcgggctcgaga

SEQ ID NO: 905 - DNA, 1420 bp, Artificial sequence
  Artificial sequence
  p5360 (oEnh::NPmito::Sulf::Nos)
agctcatttttacaacaattaccaacaacaacaaacaacaaacaacattacaattacatttacaattatcgatggcttctcggaggcttctcgcctctctcctccgtcaatcggctcaacgtggcggcggtctaatttcccgatcgttaggaaactccatccctaaatccgcttcacgcgcctcttcacgcgcatcccctaagggattcctcttaaaccgcgccgtacagtacgctacctccgcagcggcaccggcatctcagccatcaacaccaccaaagtccggcagtgaaccgtccggaaaaattaccgatgagttcaccggcgctggttcgatcggtgccatggataaatcgctcatcattttcggcatcgtcaacataacctcggacagtttctccgatggaggccggtatctggcgccagacgcagccattgcgcaggcgcgtaagctgatggccgagggggcagatgtgatcgacctcggtccggcatccagcaatcccgacgccgcgcctgtttcgtccgacacagaaatcgcgcgtatcgcgccggtgctggacgcgctcaaggcagatggcattcccgtctcgctcgacagttatcaacccgcgacgcaagcctatgccttgtcgcgtggtgtggcctatctcaatgatattcgcggttttccagacgctgcgttctatccgcaattggcgaaatcatctgccaaactcgtcgttatgcattcggtgcaagacgggcaggcagatcggcgcgaggcacccgctggcgacatcatggatcacattgcggcgttctttgacgcgcgcatcgcggcgctgacgggtgccggtatcaaacgcaaccgccttgtccttgatcccggcatggggttttttctgggggctgctcccgaaacctcgctctcggtgctggcgcggttcgatgaattgcggctgcgcttcgatttgccggtgcttctgtctgtttcgcgcaaatcctttctgcgcgcgctcacaggccgtggtccgggggatgtcggggccgcgacactcgctgcagagcttgccgccgccgcaggtggagctgacttcatccgcacacacgagccgcgccccttgcgcgacgggctggcggtattggcggcgctgaaagaaaccgcaaggattcgttaatctagacccgatcgttcaaacatttggcaataaagtttcttaagattgaatcctgttgccggtcttgcgatgattatcatataatttctgttgaattacgttaagcatgtaataattaacatgtaatgcatgacgttatttatgagatgggtttttatgattagagtcccgcaattatacatttaatacgcgatagaaaacaaaatatagcgcgcaaactaggataaattatcgcgcgcggtgtcatctatgttctgcag

SEQ ID NO: 906 - DNA, 1110 bp, Artificial sequence
  Artificial sequence
  P5375 (pMEN48) (MCS::m35S::oEnh::LexAGal4)
aagctttgagctccgcggccgcaagacccttcctctatataaggaagttcatttcatttggagaggacacgctcgagtataagagctcatttttacaacaattaccaacaacaacaaacaacaaacaacattacaattacatttacaattaccatggaagcgttaacggccaggcaacaagaggtgtttgatctcatccgtgatcacatcagccagacaggtatgccgccgacgcgtgcggaaatcgcgcagcgtttggggttccgttccccaaacgcggctgaagaacatctgaaggcgctggcacgcaaaggcgttattgaaattgtttccggcgcatcacgcgggattcgtctgttgcaggaagaggaagaagggttgccgctggtaggtcgtgtggctgccggtgaaccacttctggcgcaacagcatattgaaggtcattatcaggtcgatccttccttattcaagccgaatgctgatttcctgctgcgcgtcagcgggatgtcgatgaaagatatcggcattatggatggtgacttgctggcagtgcataaaactcaggatgtacgtaacggtcaggtcgttgtcgcacgtattgatgacgaagttaccgttaagcgcctgaaaaaacagggcaataaagtcgaactgttgccagaaaatagcgagtttaaaccaattgtcgtagatcttcgtcagcagagcttcaccattgaagggctggcggttggggttattcgcaacggcgactggctggaattccccaattttaatcaaagtgggaatattgctgatagctcattgtccttcactttcactaacagtagcaacggtccgaacctcataacaactcaaacaaattctcaagcgctttcacaaccaattgcctcctctaacgttcatgataacttcatgaataatgaaatcacggctagtaaaattgatgatggtaataattcaaaaccactgtcacctggttggacggaccaaactgcgtataacgcgtttggaatcactacagggatgtttaataccactacaatggatgatgtatataactatctattcgatgatgaagataccccaccaaacccaaaaaaagagtag

SEQ ID NO: 907 - DNA, 1905 bp, Artificial sequence
  Artificial sequence
  P5386 (pMEN57) (35S::oEnh::LexAGal4)
aagcttgcatgcctgcaggtccccagattagccttttcaatttcagaaagaatgctaacccacagatggttagagaggcttacgcagcaggtctcatcaagacgatctacccgagcaataatctccaggaaatcaaataccttcccaagaaggttaaagatgcagtcaaaagattcaggactaactgcatcaagaacacagagaaagatatatttctcaagatcagaagtactattccagtatggacgattcaaggcttgcttcacaaaccaaggcaagtaatagagattggagtctctaaaaaggtagttcccactgaatcaaaggccatggagtcaaagattcaaatagaggacctaacagaactcgccgtaaagactggcgaacagttcatacagagtctcttacgactcaatgacaagaagaaaatcttcgtcaacatggtggagcacgacacacttgtctactccaaaaatatcaaagatacagtctcagaagaccaaagggcaattgagacttttcaacaaagggtaatatccggaaacctcctcggattccattgcccagctatctgtcactttattgtgaagatagtggaaaaggaaggtggctcctacaaatgccatcattgcgataaaggaaaggccatcgttgaagatgcctctgccgacagtggtcccaaagatggacccccacccacgaggagcatcgtggaaaaagaagacgttccaaccacgtcttcaaagcaagtggattgatgtgatatctccactgacgtaagggatgacgcacaatcccactatccttcggcggccgcaagacccttcctctatataaggaagttcatttcatttggagaggacacgctcgagtataagagctcatttttacaacaattaccaacaacaacaaacaacaaacaacattacaattacatttacaattaccatggaagcgttaacggccaggcaacaagaggtgtttgatctcatccgtgatcacatcagccagacaggtatgccgccgacgcgtgcggaaatcgcgcagcgtttggggttccgttccccaaacgcggctgaagaacatctgaaggcgctggcacgcaaaggcgttattgaaattgtttccggcgcatcacgcgggattcgtctgttgcaggaagaggaagaagggttgccgctggtaggtcgtgtggctgccggtgaaccacttctggcgcaacagcatattgaaggtcattatcaggtcgatccttccttattcaagccgaatgctgatttcctgctgcgcgtcagcgggatgtcgatgaaagatatcggcattatggatggtgacttgctggcagtgcataaaactcaggatgtacgtaacggtcaggtcgttgtcgcacgtattgatgacgaagttaccgttaagcgcctgaaaaaacagggcaataaagtcgaactgttgccagaaaatagcgagtttaaaccaattgtcgtagatcttcgtcagcagagcttcaccattgaagggctggcggttggggttattcgcaacggcgactggctggaattccccaattttaatcaaagtgggaatattgctgatagctcattgtccttcactttcactaacagtagcaacggtccgaacctcataacaactcaaacaaattctcaagcgctttcacaaccaattgcctcctctaacgttcatgataacttcatgaataatgaaatcacggctagtaaaattgatgatggtaataattcaaaaccactgtcacctggttggacggaccaaactgcgtataacgcgtttggaatcactacagggatgtttaataccactacaatggatgatgtatataactatctattcgatgatgaagataccccaccaaacccaaaaaaagagtag

SEQ ID NO: 908 - DNA, 333 bp, Artificial sequence
  Artificial sequence
  P5381 LexAOP and polylinker sequence
acatatccatatctaatcttacctcgactgctgtatataaaaccagtggttatatgtccagtactgctgtatataaaaccagtggttatatgtacagtacgtcgatcgatcgacgactgctgtatataaaaccagtggttatatgtacagtactgctgtatataaaaccagtggttatatgtacagtacgtcgaggggatgatcaagacccttcctctatataaggaagttcatttcatttggagaggacacgctgacaagctgactctagcagatctggtaccgtcgacggtgagctccgcggccgctctagacaggcctcgtaccggatcc

SEQ ID NO: 909 - DNA, 2691 bp, Artificial sequence
  Artificial sequence
  P5480 (pMEN256) (opLexA::attR1::CAT::ccdB::attR2::E9)
aagcttacatatccatatctaatcttacctcgactgctgtatataaaaccagtggttatatgtccagtactgctgtatataaaaccagtggttatatgtacagtacgtcgatcgatcgacgactgctgtatataaaaccagtggttatatgtacagtactgctgtatataaaaccagtggttatatgtacagtacgtcgaggggatgatcaagacccttcctctatataaggaagttcatttcatttggagaggacacgctgacaagctgactctagcagatctgatcacaagtttgtacaaaaaagctgaacgagaaacgtaaaatgatataaatatcaatatattaaattagattttgcataaaaaacagactacataatactgtaaaacacaacatatccagtcactatggcggccgcattaggcaccccaggctttacactttatgcttccggctcgtataatgtgtggattttgagttaggatccggcgagattttcaggagctaaggaagctaaaatggagaaaaaaatcactggatataccaccgttgatatatcccaatggcatcgtaaagaacattttgaggcatttcagtcagttgctcaatgtacctataaccagaccgttcagctggatattacggcctttttaaagaccgtaaagaaaaataagcacaagttttatccggcctttattcacattcttgcccgcctgatgaatgctcatccggaattccgtatggcaatgaaagacggtgagctggtgatatgggatagtgttcacccttgttacaccgttttccatgagcaaactgaaacgttttcatcgctctggagtgaataccacgacgatttccggcagtttctacacatatattcgcaagatgtggcgtgttacggtgaaaacctggcctatttccctaaagggtttattgagaatatgtttttcgtctcagccaatccctgggtgagtttcaccagttttgatttaaacgtggccaatatggacaacttcttcgcccccgttttcaccatgggcaaatattatacgcaaggcgacaaggtgctgatgccgctggcgattcaggttcatcatgccgtctgtgatggcttccatgtcggcagaatgcttaatgaattacaacagtactgcgatgagtggcagggcggggcgtaaacgcgtggatccggcttactaaaagccagataacagtatgcgtatttgcgcgctgatttttgcggtataagaatatatactgatatgtatacccgaagtatgtcaaaaagaggtgtgctatgaagcagcgtattacagtgacagttgacagcgacagctatcagttgctcaaggcatatatgatgtcaatatctccggtctggtaagcacaaccatgcagaatgaagcccgtcgtctgcgtgccgaacgctggaaagcggaaaatcaggaagggatggctgaggtcgcccggtttattgaaatgaacggctcttttgctgacgagaacagggactggtgaaatgcagtttaaggtttacacctataaaagagagagccgttatcgtctgtttgtggatgtacagagtgatattattgacacgcccgggcgacggatggtgatccccctggccagtgcacgtctgctgtcagataaagtctcccgtgaactttacccggtggtgcatatcggggatgaaagctggcgcatgatgaccaccgatatggccagtgtgccggtctccgttatcggggaagaagtggctgatctcagccaccgcgaaaatgacatcaaaaacgccattaacctgatgttctggggaatataaatgtcaggctcccttatacacagccagtctgcaggtcgaccatagtgactggatatgttgtgttttacagtattatgtagtctgttttttatgcaaaatctaatttaatatattgatatttatatcattttacgtttctcgttcagctttcttgtacaaagtggtgatgatcctctagctagagctttcgttcgtatcatcggtttcgacaacgttcgtcaagttcaatgcatcagtttcattgcgcacacaccagaatcctactgagtttgagtattatggcattgggaaaactgtttttcttgtaccatttgttgtgcttgtaatttactgtgttttttattcggttttcgctatcgaactgtgaaatggaaatggatggagaagagttaatgaatgatatggtccttttgttcattctcaaattaatattatttgttttttctcttatttgttgtgtgttgaatttgaaattataagagatatgcaaacattttgttttgagtaaaaatgtgtcaaatcgtggcctctaatgaccgaagttaatatgaggagtaaaacacttgtagttgtaccattatgcttattcactaggcaacaaatatattttcagacctagaaaagctgcaaatgttactgaatacaagtatgtcctcttgtgttttagacatttatgaactttcctttatgtaattttccagaatccttgtcagattctaatcattgctttataattatagttatactcatggatttgtagttgagtatgaaaatattttttaatgcattttatgacttgccaattgattgacaacatgcatcaatcgacctgcagccactcgaagcggccggccgccactcga

SEQ ID NO: 910 - DNA, 607 bp, Artificial sequence
  Artificial sequence
  P25420 (MCS::(9A)TAP::E9)
agatctggtaccgtcgacggtgagctccgcggccgctgccgctgcggcagcggccatggaaaagagaagatggaaaaagaatttcatagccgtctcagcagccaaccgctttaagaaaatctcatcctccggggcacttgattatgatattccaactactgctagcgagaatttgtattttcagggtgagctcaaaaccgcggctcttgcgcaacacgatgaagccgtggacaacaaattcaacaaagaacaacaaaacgcgttctatgagatcttacatttacctaacttaaacgaagaacaacgaaacgccttcatccaaagtttaaaagatgacccaagccaaagcgctaaccttttagcagaagctaaaaagctaaatgatgctcaggcgccgaaagtagacaacaaattcaacaaagaacaacaaaacgcgttctatgagatcttacatttacctaacttaaacgaagaacaacgaaacgccttcatccaaagtttaaaagatgacccaagccaaagcgctaaccttttagcagaagctaaaaagctaaatggtgctcaggcgccgaaagtagacgcgaattccgcggggaagtcaacctga

SEQ ID NO: 911 - DNA, 511 bp, Artificial sequence
  Artificial sequence
  P25976 (12xHA(10A)::MCS)
atgagttacccatacgatgttcctgactatgcgggctatccctatgacgtcccggactatgcaggatcctatccatatgacgttccagattacgcttctagatacccatacgatgttcctgactatgcgggctatccctatgacgtcccggactatgcaggatcctatccatatgacgttccagattacgctactagttacccatacgatgttcctgactatgcgggctatccctatgacgtcccggactatgcaggatcctatccatatgacgttccagattacgcttctagatacccatacgatgttcctgactatgcgggctatccctatgacgtcccggactatgcaggatcctatccatatgacgttccagattacgctactagacaggcctcgtaccggatcctctacctagagaattccgccgctgccgctgcggcagcggctgcagcgggtaccgtcgacggtgagctccgcggccgctctagacaggcctcgtaccggatcc

SEQ ID NO: 912 - DNA, 469 bp, Artificial sequence
  Artificial sequence
  P25461 (MCS::(10A)12xHA)
agatctggtaccgtcgacggtgagctccgcggccgcggctgccgccgcagccgctgctagttacccatacgatgttcctgactatgcgggctatccctatgacgtcccggactatgcaggatcctatccatatgacgttccggattacgcttctagatacccatacgatgttcctgactatgcgggctatccctatgacgtcccggactatgcaggatcctatccatatgacgttccagattacgctactagttacccatacgatgttcctgactatgcgggctatccctatgacgtcccggactatgcaggatcctatccatatgacgttccagattacgcttctagatacccatacgatgttcctgactatgcgggctatccctatgacgtcccggactatgcaggatcctatccatatgacgttccagattacgctactagacaggcctcgtaccagatcctctag

SEQ ID NO: 913 - DNA, 926 bp, Artificial sequence
  Artificial sequence
  P21171 GR and polylinker
agatctggtaccgtcgacggtgagctccgcggccgctgaagctcgaaaaacaaagaaaaaaatcaaagggattcagcaagccactgcaggagtctcacaagacacttcggaaaatcctaacaaaacaatagttcctgcagcattaccacagctcacccctaccttggtgtcactgctggaggtgattgaacccgaggtgttgtatgcaggatatgatagctctgttccagattcagcatggagaattatgaccacactcaacatgttaggtgggcgtcaagtgattgcagcagtgaaatgggcaaaggcgataccaggcttcagaaacttacacctggatgaccaaatgaccctgctacagtactcatggatgtttctcatggcatttgccctgggttggagatcatacagacaatcaagtggaaacctgctctgctttgctcctgatctgattattaatgagcagagaatgtctctaccctgcatgtatgaccaatgtaaacacatgctgtttgtctcctctgaattacaaagattgcaggtatcctatgaagagtatctctgtatgaaaaccttactgcttctctcctcagttcctaaggaaggtctgaagagccaagagttatttgatgagattcgaatgacttatatcaaagagctaggaaaagccatcgtcaaaagggaagggaactccagtcagaactggcaacggttttaccaactgacaaagcttctggactccatgcatgaggtggttgagaatctccttacctactgcttccagacatttttggataagaccatgagtattgaattcccagagatgttagctgaaatcatcactaatcagataccaaaatattcaaatggaaatatcaaaaagcttctgtttcatcaaaaatctagacaggcctcgtaccggatcc

SEQ ID NO: 914 - DNA, 936 bp, Artificial sequence
  Artificial sequence
  P21173 GAL4 and polylinker
agatctaaatgaaccttgaagctcgaaaaacaaagaaaaaaatcaaagggattcagcaagccactgcaggagtctcacaagacacttcggaaaatcctaacaaaacaatagttcctgcagcattaccacagctcacccctaccttggtgtcactgctggaggtgattgaacccgaggtgttgtatgcaggatatgatagctctgttccagattcagcatggagaattatgaccacactcaacatgttaggtgggcgtcaagtgattgcagcagtgaaatgggcaaaggcgataccaggcttcagaaacttacacctggatgaccaaatgaccctgctacagtactcatggatgtttctcatggcatttgccctgggttggagatcatacagacaatcaagtggaaacctgctctgctttgctcctgatctgattattaatgagcagagaatgtctctaccctgcatgtatgaccaatgtaaacacatgctgtttgtctcctctgaattacaaagattgcaggtatcctatgaagagtatctctgtatgaaaaccttactgcttctctcctcagttcctaaggaaggtctgaagagccaagagttatttgatgagattcgaatgacttatatcaaagagctaggaaaagccatcgtcaaaagggaagggaactccagtcagaactggcaacggttttaccaactgacaaagcttctggactccatgcatgaggtggttgagaatctccttacctactgcttccagacatttttggataagaccatgagtattgaattcccagagatgttagctgaaatcatcactaatcagataccaaaatattcaaatggaaatatcaaaaagcttctgtttcatcaaaaaggtaccgtcgacggtgagctccgcggccgctctagacaggcctcgtaccggatcc

SEQ ID NO: 915 - DNA, 1112 bp, Artificial sequence
  Artificial sequence
  P21172 (MCS::GR::6xHA)
agatctggtaccgtcgacggtgagctccgcggccgctgaagctcgaaaaacaaagaaaaaaatcaaagggattcagcaagccactgcaggagtctcacaagacacttcggaaaatcctaacaaaacaatagttcctgcagcattaccacagctcacccctaccttggtgtcactgctggaggtgattgaacccgaggtgttgtatgcaggatatgatagctctgttccagattcagcatggagaattatgaccacactcaacatgttaggtgggcgtcaagtgattgcagcagtgaaatgggcaaaggcgataccaggcttcagaaacttacacctggatgaccaaatgaccctgctacagtactcatggatgtttctcatggcatttgccctgggttggagatcatacagacaatcaagtggaaacctgctctgctttgctcctgatctgattattaatgagcagagaatgtctctaccctgcatgtatgaccaatgtaaacacatgctgtttgtctcctctgaattacaaagattgcaggtatcctatgaagagtatctctgtatgaaaaccttactgcttctctcctcagttcctaaggaaggtctgaagagccaagagttatttgatgagattcgaatgacttatatcaaagagctaggaaaagccatcgtcaaaagggaagggaactccagtcagaactggcaacggttttaccaactgacaaagcttctggactccatgcatgaggtggttgagaatctccttacctactgcttccagacatttttggataagaccatgagtattgaattcccagagatgttagctgaaatcatcactaatcagataccaaaatattcaaatggaaatatcaaaaagcttctgtttcatcaaaaatctagttacccatacgatgttcctgactatgcgggctatccctatgacgtcccggactatgcaggatcctatccatatgacgttccagattacgcttctagatacccatacgatgttcctgactatgcgggctatccctatgacgtcccggactatgcaggatcctatccatatgacgttccagattacgctactagacaggcctcgtacc

SEQ ID NO: 916 - DNA, 1112 bp, Artificial sequence; identical to SEQ ID NO: 915
  Artificial sequence
  P21174 (GR::MCS::6xHA)

SEQ ID NO: 917 - DNA, 867 bp, Artificial sequence
  Artificial sequence
  P5425 (pMEN201) (G40::GAL4)
tataaatagctttaccaagacagatatactatcttttattaatccaaaaagactgagaactctagtaactacgtactacttaaaccttatccagtttcttgaaacagagtactctgatcaatgaactcattttcagctttttctgaaatgtttggctccgattacgagcctcaaggcggagattattgtccgacgttggccacgagttgtccgaagaaaccggcgggccgtaagaagtttcgtgagactcgtcacccaatttacagaggagttcgtcaaagaaactccggtaagtgggtttctgaagtgagagagccaaacaagaaaaccaggatttggctcgggactttccaaaccgctgagatggcagctcgtgctcacgacgtcgctgcattagccctccgtggccgatcagcatgtctcaacttcgctgactcggcttggcggctacgaatcccggagtcaacatgcgccaaggatatccaaaaagcggctgctgaagcggcgttggctttggaattccccaattttaatcaaagtgggaatattgctgatagctcattgtccttcactttcactaacagtagcaacggtccgaacctcataacaactcaaacaaattctcaagcgctttcacaaccaattgcctcctctaacgttcatgataacttcatgaataatgaaatcacggctagtaaaattgatgatggtaataattcaaaaccactgtcacctggttggacggaccaaactgcgtataacgcgtttggaatcactacagggatgtttaataccactacaatggatgatgtatataactatctattcgatgatgaagataccccaccaaacccaaaaaaagagtag

SEQ ID NO: 918 - DNA, 406 bp, Artificial sequence
  Artificial sequence
  P21195 GAL4 and polylinker sequence
agatctatgcccaattttaatcaaagtgggaatattgctgatagctcattgtccttcactttcactaacagtagcaacggtccgaacctcataacaactcaaacaaattctcaagcgctttcacaaccaattgcctcctctaacgttcatgataacttcatgaataatgaaatcacggctagtaaaattgatgatggtaataattcaaaaccactgtcacctggttggacggaccaaactgcgtataacgcgtttggaatcactacagggatgtttaataccactacaatggatgatgtatataactatctattcgatgatgaagataccccaccaaacccaaaaaaagagggtaccgtcgacggtgagctccgcggccgctctagacaggcctcgtaccggatcc

SEQ ID NO: 919 - DNA, 411 bp, Artificial sequence
  Artificial sequence
  P21378 GAL4 and polylinker
agatctggtaccgtcgacggtgagctccgcggccgccccaattttaatcaaagtgggaatattgctgatagctcattgtccttcactttcactaacagtagcaacggtccgaacctcataacaactcaaacaaattctcaagcgctttcacaaccaattgcctcctctaacgttcatgataacttcatgaataatgaaatcacggctagtaaaattgatgatggtaataattcaaaaccactgtcacctggttggacggaccaaactgcgtataacgcgtttggaatcactacagggatgtttaataccactacaatggatgatgtatataactatctattcgatgatgaagataccccaccaaacccaaaaaaagagtagtaagctctagacaggcctcgtaccggatcc

SEQ ID NO: 920 - DNA, 771 bp, Artificial sequence
  Artificial sequence
  P25799 (MCS::GFP)
agatctggtaccgtcgacggtgagctccgcggccgcatggtgagcaagggcgaggagctgttcaccggggtggtgcccatcctggtcgagctggacggcgacgtaaacggccacaagttcagcgtgtccggcgagggcgagggcgatgccacctacggcaagctgaccctgaagttcatctgcaccaccggcaagctgcccgtgccctggcccaccctcgtgaccaccctgacctacggcgtgcagtgcttcagccgctaccccgaccacatgaagcagcacgacttcttcaagtccgccatgcccgaaggctacgtccaggagcgcaccatcttcttcaaggacgacggcaactacaagacccgcgccgaggtgaagttcgagggcgacaccctggtgaaccgcatcgagctgaagggcatcgacttcaaggaggacggcaacatcctggggcacaagctggagtacaactacaacagccacaacgtctatatcatggccgacaagcagaagaacggcatcaaggtgaacttcaagatccgccacaacatcgaggacggcagcgtgcagctcgccgaccactaccagcagaacacccccatcggcgacggccccgtgctgctgcccgacaaccactacctgagcacccagtccgccctgagcaaagaccccaacgagaagcgcgatcacatggtcctgctggagttcgtgaccgccgccgggatcactctcggcatggacgagctgtacaagtccggagggatcctctag

SEQ ID NO: 921 - DNA, 775 bp, Artificial sequence
  Artificial sequence
  P25801 (MCS::(9A)CFP)
agatctggtaccgtcgacggtgagctccgcggccgctgccgctgcggcagcggccatggtgagcaagggcgaggagctgttcaccggggtggtgcccatcctggtcgagctggacggcgacgtaaacggccacaagttcagcgtgtccggcgagggcgagggcgatgccacctacggcaagctgaccctgaagttcatctgcaccaccggcaagctgcccgtgccctggcccaccctcgtgaccaccctgacctggggcgtgcagtgcttcagccgctaccccgaccacatgaagcagcacgacttcttcaagtccgccatgcccgaaggctacgtccaggagcgcaccatcttcttcaaggacgacggcaactacaagacccgcgccgaggtgaagttcgagggcgacaccctggtgaaccgcatcgagctgaagggcatcgacttcaaggaggacggcaacatcctggggcacaagctggagtacaactacatcagccacaacgtctatatcaccgccgacaagcagaagaacggcatcaaggccaacttcaagatccgccacaacatcgaggacggcagcgtgcagctcgccgaccactaccagcagaacacccccatcggcgacggccccgtgctgctgcccgacaaccactacctgagcacccagtccgccctgagcaaagaccccaacgagaagcgcgatcacatggtcctgctggagttcgtgaccgccgccgggatcactctcggcatggacgagctgtacaagtaa

SEQ ID NO: 922 - DNA, 775 bp, Artificial sequence
  Artificial sequence
  P25800 ((9A)YFP)
agatctggtaccgtcgacggtgagctccgcggccgctgccgctgcggcagcggccatggtgagcaagggcgaggagctgttcaccggggtggtgcccatcctggtcgagctggacggcgacgtaaacggccacaagttcagcgtgtccggcgagggcgagggcgatgccacctacggcaagctgaccctgaagttcatctgcaccaccggcaagctgcccgtgccctggcccaccctcgtgaccaccttcggctacggcctgcagtgcttcgcccgctaccccgaccacatgaagcagcacgacttcttcaagtccgccatgcccgaaggctacgtccaggagcgcaccatcttcttcaaggacgacggcaactacaagacccgcgccgaggtgaagttcgagggcgacaccctggtgaaccgcatcgagctgaagggcatcgacttcaaggaggacggcaacatcctggggcacaagctggagtacaactacaacagccacaacgtctatatcatggccgacaagcagaagaacggcatcaaggtgaacttcaagatccgccacaacatcgaggacggcagcgtgcagctcgccgaccactaccagcagaacacccccatcggcgacggccccgtgctgctgcccgacaaccactacctgagctaccagtccgccctgagcaaagaccccaacgagaagcgcgatcacatggtcctgctggagttcgtgaccgccgccgggatcactctcggcatggacgagctgtacaagtaa

SEQ ID NO: 923 - DNA, 774 bp, Artificial sequence
  Artificial sequence
  P32122 (MCS::GFP)
aagcttctggtaccgtcgacccgcggccgctctagacccatggtgagcaagggcgaggagctgttcaccggggtggtgcccatcctggtcgagctggacggcgacgtaaacggccacaagttcagcgtgtccggcgagggcgagggcgatgccacctacggcaagctgaccctgaagttcatctgcaccaccggcaagctgcccgtgccctggcccaccctcgtgaccaccctgacctacggcgtgcagtgcttcagccgctaccccgaccacatgaagcagcacgacttcttcaagtccgccatgcccgaaggctacgtccaggagcgcaccatcttcttcaaggacgacggcaactacaagacccgcgccgaggtgaagttcgagggcgacaccctggtgaaccgcatcgagctgaagggcatcgacttcaaggaggacggcaacatcctggggcacaagctggagtacaactacaacagccacaacgtctatatcatggccgacaagcagaagaacggcatcaaggtgaacttcaagatccgccacaacatcgaggacggcagcgtgcagctcgccgaccactaccagcagaacacccccatcggcgacggccccgtgctgctgcccgacaaccactacctgagcacccagtccgccctgagcaaagaccccaacgagaagcgcgatcacatggtcctgctggagttcgtgaccgccgccgggatcactctcggcatggacgagctgtacaagtccggagggatcctctag

SEQ ID NO: 924 - DNA, 2081 bp, Artificial sequence
  Artificial sequence
  P21142 (MCS::intGUS)
ggtaccgtcgacggtgagctccgcggccgctctagaccggaaccgtcgagcatggtccgtcctgtagaaaccccaacccgtgaaatcaaaaaactcgacggcctgtgggcattcagtctggatcgcgaaaactgtggaattgatcagcgttggtgggaaagcgcgttacaagaaagccgggcaattgctgtgccaggcagttttaacgatcagttcgccgatgcagatattcgtaattatgcgggcaacgtctggtatcagcgcgaagtctttataccgaaaggttgggcaggccagcgtatcgtgctgcgtttcgatgcggtcactcattacggcaaagtgtgggtcaataatcaggaagtgatggagcatcagggcggctatacgccatttgaagccgatgtcacgccgtatgttattgccgggaaaagtgtacgtaagtttctgcttctacctttgatatatatataataattatcattaattagtagtaatataatatttcaaatatttttttcaaaataaaagaatgtagtatatagcaattgcttttctgtagtttataagtgtgtatattttaatttataacttttctaatatatgaccaaaatttgttgatgtgcaggtatcaccgtttgtgtgaacaacgaactgaactggcagactatcccgccgggaatggtgattaccgacgaaaacggcaagaaaaagcagtcttacttccatgatttctttaactatgccggaatccatcgcagcgtaatgctctacaccacgccgaacacctgggtggacgatatcaccgtggtgacgcatgtcgcgcaagactgtaaccacgcgtctgttgactggcaggtggtggccaatggtgatgtcagcgttgaactgcgtgatgcggatcaacaggtggttgcaactggacaaggcactagcgggactttgcaagtggtgaatccgcacctctggcaaccgggtgaaggttatctctatgaactgtgcgtcacagccaaaagccagacagagtgtgatatctacccgcttcgcgtcggcatccggtcagtggcagtgaagggcgaacagttcctgattaaccacaaaccgttctactttactggctttggtcgtcatgaagatgcggacttgcgtggcaaaggattcgataacgtgctgatggtgcacgaccacgcattaatggactggattggggccaactcctaccgtacctcgcattacccttacgctgaagagatgctcgactgggcagatgaacatggcatcgtggtgattgatgaaactgctgctgtcggctttaacctctctttaggcattggtttcgaagcgggcaacaagccgaaagaactgtacagcgaagaggcagtcaacggggaaactcagcaagcgcacttacaggcgattaaagagctgatagcgcgtgacaaaaaccacccaagcgtggtgatgtggagtattgccaacgaaccggatacccgtccgcaaggtgcacgggaatatttcgcgccactggcggaagcaacgcgtaaactcgacccgacgcgtccgatcacctgcgtcaatgtaatgttctgcgacgctcacaccgataccatcagcgatctctttgatgtgctgtgcctgaaccgttattacggatggtatgtccaaagcggcgatttggaaacggcagagaaggtactggaaaaagaacttctggcctggcaggagaaactgcatcagccgattatcatcaccgaatacggcgtggatacgttagccgggctgcactcaatgtacaccgacatgtggagtgaagagtatcagtgtgcatggctggatatgtatcaccgcgtctttgatcgcgtcagcgccgtcgtcggtgaacaggtatggaatttcgccgattttgcgacctcgcaaggcatattgcgcgttggcggtaacaagaaagggatcttcactcgcgaccgcaaaccgaagtcggcggcttttctgctgcaaaaacgctggactggcatgaacttcggtgaaaaaccgcagcagggaggcaaacaatgaatcaacaactctcctggcggatcctctag

SEQ ID NO: 925 - DNA, 1215 bp, Artificial sequence
  Artificial sequence
  P25755 (MCS::YFPLTI6b)
aagcttggtaccgtcgacgagctctctagaggccattatggccccatggtgagcaagggcgaggagctgttcaccggggtggtgcccatcctggtcgagctggacggcgacgtaaacggccacaagttcagcgtgtccggcgagggcgagggcgatgccacctacggcaagctgaccctgaagttcatctgcaccaccggcaagctgcccgtgccctggcccaccctcgtgaccaccttcggctacggcctgaagtgcttcgcccgctaccccgaccacatgaagcagcacgacttcttcaagtccgccatgcccgaaggctacgtccaggagcgcaccatcttcttcaaggacgacggcaactacaagacccgcgccgaggtgaagttcgagggcgacaccctggtgaaccgcatcgagctgaagggcatcgacttcaaggaggacggcaacatcctggggcacaagctggagtacaactacaacagccacaacgtctatatcatggccgacaagcagaagaacggcatcaaggtgaacttcaagatccgccacaacatcgaggacggcagcgtgcagctcgccgaccactaccagcagaacacccccatcggcgacggccccgtgctgctgcccgacaaccactacctgagctaccagtccgccctgagcaaagaccccaacgagaagcgcgatcacatggtcctgctggagttcgtgaccgccgccgggatcactctcggcatggacgagctgtacaagtccggagctgcggccgctgccgctgcggcagcggccgaattcaagcgcttgaaaatgagtacagccactttcgtagagattattcttgctatcatcttgcctcctctcggcgtctttctcaaatttggttgcaaggttgagttttggatatgtttgattttgacgctgtttggttatcttcccggaatcctttacgctctttataccatcaccaagtgatttttcctatctcctctgttctttcctcttgctcctcgaagatcagctgtttcgtcgtgctcttctccctttgggactgattcatcatttattttatgttatgagcaattgtattctcattgttgtatttgcattattgtatactttctgctgatatcaagaaaaaatcgttggtttatgtgaggaatttatttatttcgtttaatttgtacaattggtaaaatgttgcaatga

SEQ ID NO: 926 - DNA, 867 bp, Artificial sequence
  Artificial sequence
  P21103 poly linker and Pdk intron
ggtaccgtcgacgaggaattcggtagcccaattggtaaggaaataattattttcttttttccttttagtataaaatagttaagtgatgttaattagtatgattataataatatagttgttataattgtgaaaaaataatttataaatatattgtttacataaacaacatagtaatgtaaaaaaatatgacaagtgatgtgtaagacgaagaagataaaagttgagagtaagtatattatttttaatgaatttgatcgaacatgtaagatgatatactagcattaatatttgttttaatcataatagtaattctagctggtttgatgaattaaatatcaatgataaaatactatagtaaaaataagaataaataaattaaaataatatttttttatgattaatagtttattatataattaaatatctataccattactaaatattttagtttaaaagttaataaatattttgttagaaattccaatctgcttgtaatttatcaataaacaaaatattaaataacaagctaaagtaacaaataatatcaaactaatagaaacagtaatctaatgtaacaaaacataatctaatgctaatataacaaagcgcaagatctatcaattttatatagtattatttttcaatcaacattcttattaatttctaaataatacttgtagttttattaacttctaaatggattgactattaattaaatgaattagtcgaacatgaataaacaaggtaacatgatagatcatgtcattgtgttatcattgatcttacatttggattgattacagttgggaaattgggttcgaaatcgataatcttgcggccgctctagacaggcctcgtaccggatcc

SEQ ID NO: 927 - DNA, 574 bp, Cauliflower mosaic virus
  CaMV 35S promoter
gcggattccattgcccagctatctgtcactttattgtgaagatagtgaaaaagaaggtggctcctacaaatgccatcattgcgataaaggaaaggccatcgttgaagatgcctctgccgacagtggtcccaaagatggacccccacccacgaggagcatcgtggaaaaagaagacgttccaaccacgtcttcaaagcaagtggattgatgtgatggtccgattgagacttttcaacaaagggtaatatccggaaacctcctcggattccattgcccagctatctgtcactttattgtgaagatagtggaaaaggaaggtggctcctacaaatgccatcattgcgataaaggaaaggccatcgttgaagatgcctctgccgacagtggtcccaaagatggacccccacccacgaggagcatcgtggaaaaagaagacgttccaaccacgtcttcaaagcaagtggattgatgtgatatctccactgacgtaagggatgacgcacaatcccactatccttcgcaagacccttcctctatataaggaagttcatttcatttggagaggacacgctga

SEQ ID NO: 928 - DNA, 1183 bp, Arabidopsis thaliana; identical to SEQ ID NO: 895
  LTP1 (Lipid Transfer Protein 1) promoter

SEQ ID NO: 929 - DNA, 1009 bp, Lycopersicon esculentum; identical to SEQ ID NO: 896
  RBCS3 (Ribulose 1,5-bisphosphate carboxylase, small subunit 3) promoter

SEQ ID NO: 930 - DNA, 4361 bp, Arabidopsis thaliana; identical to SEQ ID NO: 899
  STM (Shoot Meristemless) promoter

SEQ ID NO: 931 - DNA, 2244 bp, Arabidopsis thaliana; identical to SEQ ID NO: 900
  SUC2 (Sucrose-proton Symporter) promoter

SEQ ID NO: 932 - DNA, 2365 bp, Arabidopsis thaliana; identical to SEQ ID NO: 892
  ARSK1 (Root-specific Kinase 1) promoter

SEQ ID NO: 933 - DNA, 1176 bp, Arabidopsis thaliana; identical to SEQ ID NO: 894
  CUT1 (Cuticular Wax Condensing Enzyme1) promoter

SEQ ID NO: 934 - DNA, 922 bp, Lycopersion esculentum; identical to SEQ ID NO: 898
  RSI1 (Root System Inducible 1) promoter

SEQ ID NO: 935 - DNA, 3446 bp, Arabidopsis thaliana; identical to SEQ ID NO: 891
  AP1 (floral meristem-specific) promoter

SEQ ID NO: 936 - DNA, 4801 bp, Arabidopsis thaliana; identical to SEQ ID NO: 893
  AS1 (emergent leaf primordia-specific) promoter

SEQ ID NO: 937 - DNA, 1510 bp, Arabidopsis thaliana; identical to SEQ ID NO: 897
  RD29A (Desiccation-responsive 29a) promoter

SEQ ID NO: 938 - protein, 121 aa, Arabidopsis thaliana
  misc_feature (2)..(3): Xaa can be any naturally occurring amino acid
  misc_feature (5)..(5): Xaa can be any naturally occurring amino acid
  misc_feature (11)..(11): Xaa can be any naturally occurring amino acid
  misc_feature (28)..(29): Xaa can be any naturally occurring amino acid
  misc_feature (38)..(38): Xaa can be any naturally occurring amino acid
  misc_feature (39)..(48): Xaa can be any naturally occurring amino acid or no amino acid
  misc_feature (49)..(50): Xaa can be any naturally occurring amino acid
  misc_feature (53)..(53): Xaa can be any naturally occurring amino acid
  misc_feature (55)..(55): Xaa can be any naturally occurring amino acid
  misc_feature (57)..(57): Xaa can be any naturally occurring amino acid
  misc_feature (61)..(61): Xaa can be any naturally occurring amino acid
  misc_feature (63)..(63): Xaa can be any naturally occurring amino acid or no amino acid
  misc_feature (79)..(79): Xaa can be any naturally occurring amino acid or no amino acid
  misc_feature (94)..(94): Xaa can be any naturally occurring amino acid
  misc_feature (96)..(96): Xaa can be any naturally occurring amino acid
  misc_feature (100)..(102): Xaa can be any naturally occurring amino acid
  misc_feature (104)..(104): Xaa can be any naturally occurring amino acid
  misc_feature (107)..(112): Xaa can be any naturally occurring amino acid
  misc_feature (114)..(114): Xaa can be any naturally occurring amino acid
  misc_feature (116)..(116): Xaa can be any naturally occurring amino acid
  misc_feature (119)..(119): Xaa can be any naturally occurring amino acid
  G867 clade consensus sequence
KXXEXFLFEKXVTPSDVGKLNRLVIPKXXAEKHFPLPXZZZZZZZZZZXXKGXLXNXEDVXGZKVWRFRYSYWNSSQSZYVLTKGWSRFVKEKXLXAGDXXXFXRSXXXXXXLXIXWKXRS
